(19) United States
(12) Patent Application Publication
(10) Pub. No.: US 2023/0021641 A1
(43) Pub. Date: Jan. 26, 2023

(54) CAS9 VARIANTS HAVING NON-CANONICAL PAM SPECIFICITIES AND USES THEREOF

(71) Applicants: The Broad Institute, Inc., Cambridge, MA (US); President and Fellows of Harvard College, Cambridge, MA (US)

(72) Inventors: David R. Liu, Cambridge, MA (US); Tina Wang, Madison, WI (US); Shannon Miller, Somerville, MA (US)

(73) Assignees: The Broad Institute, Inc., Cambridge, MA (US); President and Fellows of Harvard College, Cambridge, MA (US)

(21) Appl. No.: 17/270,396

(22) PCT Filed: Aug. 23, 2019
(86) PCT No.: PCT/US19/47996

§ 371 Date: Feb. 22, 2021

Related U.S. Application Data
(60) Provisional application No. 62/722,057, filed on Aug. 23, 2018.
(60) Provisional application No. 62/886,937, filed on Aug. 14, 2019.

(51) Int. Cl. C12N 9/22; C12N 15/62; C12N 15/11

(52) U.S. Cl. CPC C12N 9/22; C12N 15/111; C12N 15/62

(57) ABSTRACT

Some aspects of this disclosure provide strategies, systems, reagents, methods, and kits that are useful for engineering Cas9 and Cas9 variants that have increased activity on target sequences that do not contain the canonical PAM sequence. In some embodiments, fusion proteins comprising such Cas9 variants and nucleic acid editing domains, e.g., deaminase domains, are also provided.

### RELATED APPLICATIONS

[0001] This application claims priority to U.S. Provisional Patent Application No. 62/722,057 filed Aug. 23, 2018, and to U.S. Provisional Patent Application No. 62/886,937, filed Aug. 14, 2019, each of which are incorporated herein by reference.

### BACKGROUND OF THE INVENTION

[0002] CRISPR-Cas systems, and especially systems based on the Cas9 enzyme from Streptococcus pyogenes (SpCas9) have successfully been engineered for genome editing and base editing in a wide range of organisms. As one example, base editors have been developed that convert Cas endonucleases into programmable nucleotide deaminases^{1,2,3}, thus facilitating the introduction of C-to-T mutations (by C-to-U deamination) or A-to-G mutations (by A-to-I deamination) without induction of a double-strand break^{4,5}.

[0003] One drawback of current genome and base engineering tools (e.g., ZNFs, TALENS, and CRISPR/Cas9) is that they are limited with respect to the DNA sequences that can be targeted. For example, ZNF and TALENS are limited because each system requires the design of a specific DNA-binding portion, the amino acid sequence of which being a function of each individual target nucleotide sequence. CRISPR/Cas9 technologies are also limited. While Cas9 can be programmably targeted to virtually any target sequence by providing a suitable guide RNA, Cas9 strictly requires the presence of a protospacer-adjacent motif (PAM)—which is typically the canonical nucleotide sequence 5′-NGG-3′ (e.g., for SpCas9)—immediately adjacent to the 3′-end of the targeted nucleic acid sequence in order for the Cas9 to bind and act upon the target sequence. This requirement for a PAM sequence effectively limits the nucleotide sequences which can be efficiently targeted by Cas9.

[0004] Accordingly, there is a need for nucleic acid programmable DNA binding proteins, such as Cas9, that are capable of binding target nucleotide sequences that lack canonical PAMs (e.g., 5′-NGG-3′ for SpCas9) in order to expand the scope and flexibility of genome and base editing.

### SUMMARY OF THE INVENTION

[0005] The clustered regularly interspaced short palindromic repeat (CRISPR) system is a prokaryotic adaptive immune system that has been modified to enable robust genome and nucleobase engineering in a variety of organisms and cell lines. CRISPR-Cas (CRISPR-associated) systems are protein-RNA complexes that use an RNA molecule (sgRNA) as a guide to localize the complex to a target nucleic acid sequence via base-pairing. In the natural systems, a Cas protein then acts as an endonuclease to cleave the targeted DNA sequence. The target nucleic acid sequence must be both complementary to the sgRNA and also contain a “protospacer-adjacent motif” (PAM) at the 3′-end of the complementary region in order for the system to function. The requirement for a PAM sequence limits the use of Cas9 technology, especially for applications that require precise Cas9 positioning, such as base editing, which requires a PAM approximately 13-17 nucleotides from the target base and some forms of homology-directed repair, which are most efficient when DNA cleavage occurs ˜10-20 base pairs away from a desired alteration. To address this limitation, researchers have harnessed natural CRISPR nucleases with different PAM requirements and engineered existing systems to accept variants of naturally recognized PAMs. Other natural CRISPR nucleases shown to function efficiently in mammalian cells include Staphylococcus aureus Cas9 (SaCas9), Acidaminococcus sp. Cpf1 (AsCpf1), Lachnospiraceae bacterium Cpf1, Campylobacter jejuni Cas9, Streptococcus thermophilus Cas9, and Neisseria meningitides Cas9. None of these mammalian cell-compatible CRISPR nucleases, however, offers a PAM that occurs as frequently as that of SpCas9.

[0006] Some aspects of the disclosure relate to novel Cas9 mutants that are capable of binding to target sequences that do not include a canonical PAM sequence (5′-NGG-3′, where N is any nucleotide) at the 3′-end. The disclosure also provides methods of generating and identifying novel Cas9 variants, e.g., using Phage Assisted Continuous Evolution (PACE) and/or Phage Assisted Non-Continuous Evolution (PANCE), that are capable of recognizing (e.g., binding to) target sequences encompassing the a variety of PAM sequences. In particular, methods and compositions have been developed for targeting sequences that have an adenine (A) at the second nucleic acid position of the PAM (e.g., 5′-NAN-3′). It should be appreciated that target sequences having PAMs that lack one or more guanines (Gs) are particularly difficult to target given the paucity of SpCas9 activity (e.g., binding activity) on such sequences. One goal of the disclosure is to provide a repertoire of SpCas9 variants that could be selected from for use in genome and/or base editing applications that are specific for a target nucleic acid sequence (e.g., DNA sequence) based on a particular PAM sequence. Such a catalogue/library of SpCas9 variants would be useful for expanding the scope of genome and base editing, so as not to be restricted by any particular PAM requirement.

### BRIEF DESCRIPTION OF THE DRAWINGS

[0007] FIGS. 1A-1C show schematic representations of Phage Assisted Continuous Evolution (PACE) of Cas9 and results of SpCas9 vs xCas9 evolution. FIG. 1A, PACE takes place in a fixed-volume “lagoon” that is continuously diluted with fresh host E. coli cells. Upon infection, each selection phage (SP) that encodes a Cas9 variant capable of binding the target PAM and protospacer on the accessory plasmid (AP) induces expression of gene III, resulting in infectious progeny phage that propagate the active Cas9 variant in subsequent host cells. FIG. 1B, accessory plasmids representing each of 64 PAM sequences are used to select for Cas9 variants capable of binding to the PAM/protospacer sequences, where RNAP fused to the Cas9 variant induces express ion of gene III upon binding to the sequence having the specific PAM. FIG. 1C, data (luciferase assay) for overnight phage propagation reveals on which PAMs SpCas9 and xCas9 have binding activity. xCas9 has a less strict PAM requirement as compared to SpCas9.

[0008] FIGS. 2A-B show a schematic representation of a Cas9 64 PAM Phage Assisted Non-Continuous Evolution (PANCE) and results of SpCas9 vs xCas9 PANCE evolution. FIG. 2A, 96 well PANCE format allowed for simultaneous evolution of all 64 PAM sequences. PANCE is lower stringency than PACE as it is not continuous flow, thereby allowing for evolution from low activity. FIG. 2B, data (luciferase assay) for PANCE evolution at passage 2 (P2), passage 12 (P12), and passage 16 (P16) for SpCas9 (wt) or xCas9 show an increase in the ability to bind additional PAM sequences.

[0009] FIGS. 3A-B show clones resulting from PANCE evolution experiments using SpCas9 (N3) after passage 12, including the activity for selected clones. FIG. 3A, is a table listing individual clones and their mutations as compared to nuclease inactive SpCas9. The nomenclature of each clone indicates the PAM on which the clone was evolved. For example, clones CAA-2, CAA-3, and CAA-4 were evolved using a 5′-CAA-3′-PAM sequence. FIG. 3B, shows activity for clones SpCas9, CAA-3, GAT-2, ATG-2, ATG-3, and AGC-3, using a luciferase assay. Clones were obtained from PANCE evolution experiments using SpCas9 (N3) after passage 12.

[0010] FIGS. 4A-B show clones resulting from PANCE evolution experiments using SpCas9 (N3) after passage 19, including the activity for selected clones. FIG. 4A, is a table listing individual clones and their mutations as compared to nuclease inactive SpCas9. The nomenclature of each clone indicates the PAM on which the clone was evolved. For example, clones ACG-1, ACG-2, ACG-3, and ACG-4 were evolved using a 5′-ACG-3′-PAM sequence. FIG. 4B, shows activity for clones SpCas9, N3.19.CAA1, N3.19.CAA2, N3.19.GAA1, N3.19.GAA2, N3.19.GAC5, N3.19.GAT1, N3.19.GAT3, N3.19.ACG1, N3.19.ACG3, N3.19.ACG6, N3.19.ATG3, and N3.19.ATG6 using a luciferase assay. Clones were obtained from PANCE evolution experiments using SpCas9 (N3) after passage 19.

[0011] FIGS. 5A-B show clones resulting from PANCE evolution experiments using xCas9 3.7 (N4) after passage 12, including the activity for selected clones. FIG. 5A, is a table listing individual clones and their mutations as compared to xCas9 3.7. The table indicates the PAM on which each of the clones was evolved. For example, clones N4.12.10 TAT1, N4.12.10 TAT2, and N4.12.10 TAT3 were evolved using a 5′-TAT-3′-PAM sequence. FIG. 5B, shows activity for clones xCas9 (xCas9 3.7), TAT-1, TAT-3, GTA-1, GTA-3, and CAC-2 using a luciferase assay. Clones were obtained from PANCE evolution experiments using xCas9 3.9 (N4) after passage 12.

[0012] FIGS. 6A-B show clones resulting from PANCE evolution experiments using xCas9 3.7 (N4) after passage 19, including the activity for selected clones. FIG. 6A, is a table listing individual clones and their mutations as compared to xCas9 3.7. The table indicates the PAM on which each of the clones was evolved. For example, clones N4.19.AAA1, N4.19.AAA2, N4.19.AAA4, and N4.19.AAA7 were evolved using a 5′-AAA-3′-PAM sequence. FIG. 6B, shows activity for N4.19.AAA1, N4.19.TAA2, N4.19.TAA5, N4.19.TAT5, N4.19.CAC5, N4.19.CAC6, N4.19.GTA2, N4.19.GTA7, N4.19.GCC2, N4.19.GCC5, and N4.19.GCC8 using a luciferase assay. Clones were obtained from PANCE evolution experiments using xCas9 3.9 (N4) after passage 19.

[0013] FIG. 7 shows the results of mammalian cell editing using cytidine base editor BE3 having various evolved Cas9 clones (top). Indel formation for each of the clones as nuclease active Cas9s is also provided (bottom).

[0014] FIG. 8 shows activity data (luciferase assay) for PANCE evolution experiments after passage 2 (N6.2), passage 12 (N6.12) and passage 16 (N6.16) using N4.12.TAT1 as the starting clone (N6). Increased shading indicates increased activity as described in FIG. 1C.

[0015] FIGS. 9A-B show the mutations of TAT1 well as activity data (luciferase assay) on all 64 possible PAM sequences. FIG. 9A provides the individual mutations of N4.12.TAT1 (TAT1) as compared to SpCas9. FIG. 9B shows activity of TAT1 on all 64 possible PAM sequences. Increased shading indicates increased activity as described in FIG. 1C.

[0016] FIG. 10 shows clones of resulting from PANCE evolution experiments using N4.12.TAT1 (N6) after passage 12. The individual mutations in clones N6.12.6, N6.12.7, N6.12.25, and N6.12.28, are shown as compared to TAT1.

[0017] FIG. 11 shows clones of resulting from PANCE evolution experiments using N4.12.TAT1 (N6) after passage 18. The individual mutations for each of the listed clones (e.g., N6.18.1-1, N6, 18.1-2, etc.), are shown as compared to TAT1.

[0018] FIG. 12 shows activity for N6.18.17-2, N6.18.18-2, N6.18.18-3, N6.18.28-2, N6.18.33-3, N6.18.39-1, N6.18.39-3, N6.18.39-4, N6.18.40-2, N6.18.40-3, N6.18.44-1, SPO47a, and SpCas9. using a luciferase assay. Clones were obtained from PANCE evolution experiments using N4.12.TAT1 (N6) after passage 18 (See FIG. 11).

[0019] FIGS. 13A-B show a split-intein PACE configuration to allow evolution of two separate activities of interest. FIG. 13A shows that the bacteriophage gIII gene that produces the pIII protein is split into N-terminal (g3N) and C-terminal (g3C) fragments in two separate accessory plasmids (AP1 and AP2). AP1 and AP2 have the same PAM, but a different protospacer (it is not required that they have the same PAM, i.e., both the PAM and protospacer could be changed). FIG. 13B shows the workflow for using a split-intein PACE configuration of the gIII gene.

[0020] FIGS. 14A-C show the evolution and activity of SpCas9 resulting from PACE experiments using two separate protospacers and split-intein fusion (two allow evolution on two protospacers) as in FIGS. 13A-B. FIG. 14A shows clones resulting from PACE evolution experiments using two protospacers with SpCas9 after passage 4 (P4). FIG. 14B shows the ability of the P4 SpCas9 variants incorporated into a BE4max base-editor to support conversion of C to T in CAG, CAT, GAT, CAA, GAA, CGT, or GGG PAMs. FIG. 14C shows the ability of the L2-72-4 SpCas9 P4 clone to form insertions or deletions in CAA1, CAA2, AAA1, AAA2, TAA1, TAA2, CAG1, CAG2, GAT1, GAT2, TAT1, TAT2, CAT, GAA1, GAA2, CGT, and GGG PAMs.

[0021] FIGS. 15A-B show a split-intein PACE configuration (whereby Cas9 is divided into two parts to limit Cas9 concentration) to allow evolution of Cas9 proteins of interest. FIG. 15A shows that increasing the SpCas9 concentration increases cleavage of alternative (NAG) PAMs (as reported in Karvelis, T., Gasiunas, G., Young, J., Bigelyte, G., Silanskas, A., Cigan, M., and Siksnys, V. (2015). Rapid characterization of CRISPR-Cas9 protospacer adjacent motif sequence elements. Genome Biol. 16, 253). FIG. 15B shows that the amount of Cas9 protein may be limited in PACE by splitting the inactive Cas9 protein (dCas9) into an N-terminal fragment (dCas9 (1-573)) and a C-terminal fragment (dCas9 (573-end)) and producing the N-terminal fragment from a low-copy number plasmid with a weak promoter (rpoZ).

[0022] FIG. 16 shows clones resulting from PACE evolution when a split-intein Cas9 protein with the P4.2.72.4. mutations Experiment P10). The individual mutations for each of the listed clones (e.g., L5.144.2, L5.144.6, etc.), are shown as compared to spCas9 and spCas9 with the P4.2.72.4. mutations.

[0023] FIG. 17 shows the ability of the P10 SpCas9 variants from FIG. 16 incorporated into a BE4max base-editor to support conversion of C to T in CAG, GAT, TAT, CAT, GAA, CAA-1, or CAA-2 PAMs.

[0024] FIG. 18 shows the ability of two P10 SpCas9 variants (P10.5.144.2 and P10.6.144.2) to form insertions or deletions in CAA1, CAA2, AAA1, AAA2, TAA1, TAA2, CAG1, CAG2, GAT1, GAT2, TAT1, TAT2, CAT, GAA1, GAA2, CGT, and GGG PAMs compared to a P4 variant (L2-72-4), SpCas9, and xCas9.

[0025] FIGS. 19A-C show characterization of a P10 SpCas9 variant with PAM depletion in E. coli. FIG. 19A shows a workflow for PAM depletion in E. coli, wherein E. coli containing a Cas9 variant (e.g., P10) are transformed with a library of negative selection plasmids (e.g., pUC ampR with HEK3 protospacer followed by NNNN). See Kleinstiver et al., Engineered CRISPR-Cas9 nucleases with altered PAM specificities, Natur; 523: 481-485. The transformed cells are recovered and Cas9 expression is induced for 1-4 hours. The cells are then plated on carbenicillin media. The plates are then scraped and surviving colonies are sequenced for mutations. Colonies that survive and are sequenced contain PAMs that the P10 Cas9 variant protein could not cut. FIG. 19B shows the frequency of PAM sequences present in surviving colonies, wherein more shaded PAM sequences occur more frequently (left), and the activity of P10 Cas9 variant protein on the PAM sequences in a luciferase assay (right). FIG. 19C the activity of the P10 SpCas9 variants were characterized by PAM depletion incorporated into a BE4max base-editor to support conversion of C to T in CAG, CAT, GAT, CAA, GAA, CGT, or GGG PAMs

[0026] FIG. 20 shows a characterization of the P10 SpCas9 variant protein following PAM depletion as in FIGS. 19A-19C. The P10 SpCas9 variant protein (left) and xCas9 variant proteins (middle) show preference for the fourth nucleotide in the PAM, wherein C is the most preferred and G is the least preferred. The spCas9 protein (right) does not show this preference. Higher Cas9 protein activity is denoted by darker shading.

[0027] FIG. 21 shows clones resulting from split-intein PACE evolution of Cas9 with the P4.2.72.4 mutations Experiment P11) with a AAA PAM. The individual mutations for each of the listed clones (e.g., P11.1.139-2, P11.1.139-4, etc.), are shown as compared to spCas9 with the P4.2.72.4. mutations.

[0028] FIG. 22 shows the ability of the P11 SpCas9 variants from FIG. 16 incorporated into a BE3 base-editor to support conversion of C to T in CAG, GAT, CAT, GAA, AAA-1, AA1-2, CAA-1, CAA-2, or GGG PAMs.

[0029] FIG. 23 shows the ability of two P11 SpCas9 variants (P11-SacB-1 and P11-SacB-2) to form insertions or deletions in CAA1, CAA2, AAA1, AAA2, TAA1, TAA2, CAG1, CAG2, GAT1, GAT2, TAT1, TAT2, CAT, GAA1, GAA2, CGT, and GGG PAMs compared to a P4 variant (L2-72-4), SpCas9, and xCas9.

[0030] FIGS. 24A-B show clones resulting from split-intein PACE evolution of Cas9 with P12 mutations on AAT (FIG. 24A) or TAT (FIG. 24B) PAMs. The individual mutations for each of the listed clones (e.g., P12.3.b9-2, P12.3.b10-2 etc.), are shown as compared to spCas9 protein.

[0031] FIGS. 25A-B show the ability of the P12 SpCas9 variants from FIGS. 24A-B incorporated into a BE3 base-editor to support conversion of C to T at sites s893, s1073, s1081, s1140, b3, e1, e2, f1, f2, s33, s34, s35, s36, s37, s38, s39, s40, s41, s43, s44, s45, or s46. Darker shading indicates a higher % of C to T editing (FIG. 25A). FIG. 25B shows the average C to T editing on NATA, NATT, NATC, or NATG PAMs. pSM060ax is clone P12.3.b9-8 and pSM060ay is clone P12.3.b10-6.

[0032] FIGS. 26A-B show the ability of two P12 SpCas9 variants (P12.3.b9-8 and P12.3.b10-6) to cleave DNA in bacterial PAM depletion in AAA, AAC, AAT, AAG, CAA, CAC, CAT, CAG, TAA, TAC, TAT, TAG, GAA, GAT, GAG, AGA, AGC, AGT, AGG, CGA, CGC, CGT, CGG, TGA, TGC, TGT, TGG, GGA, GGC, GGT, or GGG PAMs. PPDV is the PAM frequency after Cas9 cutting/frequency of input library, wherein lower numbers signify more active Cas9 proteins.

[0033] FIGS. 27A-B show a split-intein PACE configuration to allow evolution of Cas9 proteins of interest with 2 protospacers. FIG. 27A shows evolution of a split-intein Cas9 using selection on 2 protospacers. A second gene (gVI) is removed from the phage and is used as a selection marker on AP2. AP1 and AP2 have the same PAM, but different protospacers and a different nucleotide immediately 3′ of the PAM. FIG. 27B shows clones resulting from split-intein PACE evolution of Cas9 as in FIG. 27A. The individual mutations for each of the listed clones (e.g., L2-120-1, L2-120-2, etc.), are shown as compared to spCas9 protein.

[0034] FIG. 28 shows survival-based selection for isolating nuclease-active Cas9 variant proteins. In this selection, cutting identifies nuclease-active PACE variants. SacB is lethal in the presence of sucrose unless it is cut by Cas9, sfGFP loses fluorescence if Cas9 cutting occurs, and kanR confers survival on kanamycin medium if no cutting occurs.

[0035] FIGS. 29A-B show nuclease-active TAT variants that were identified by SacB selection as in FIG. 28. The original spCas9 TAT variant was isolated from PANCE evolution on a TAT PAM (N4.TAT.1), but had no nuclease activity. This N4.TAT.1 (TAT1) Cas9 variant was subcloned from the pool of N4.TAT SP (H840-onward) into a Cas9 plasmid and selected for variants that could cut a SacB selection plasmid with a TAT PAM after a 4 hour induction. FIG. 29A shows clones resulting from SacB selection of nuclease-inactive TAT. The individual mutations for each of the listed clones (e.g., SacB-TAT-1, SacB-TAT-2), are shown as compared to SpCas9 and TAT SpCas9 variant proteins. FIG. 29B shows the location of mutations in the TAT SpCas9 variant proteins.

[0036] FIGS. 30A-B show the activity of the TAT SpCas9 variant proteins identified in FIG. 29A. FIG. 30A shows the ability of the nuclease-active TAT SpCas9 variants (SacB-TAT1 and SacB-TAT2) incorporated into a BE4max base-editor to support conversion of C to T in CAG, GAT, TAT, CAT, GAA-1, GAA-2, CAA-1, CAA-2, or GGG PAMs. FIG. 30B shows ability of the SacB-TAT1 and SacB-TAT2 variants to form PAM depletion in CAA1, CAA2, AAA1, AAA2, TAA1, TAA2, CAG1, CAG2, GAT1, GAT2, TAT1, TAT2, CAT, GAA1, GAA2, CGT, or GGG PAMs.

[0037] FIG. 31 shows the ability of the SacB-TAT-1 SpCas9 protein variant to form insertions or deletions in AAA, AAC, AAT, AAG, CAA, CAC, CAT, CAG, TAA, TAC, TAT, TAG, GAA, GAT, GAG, AGA, AGC, AGT, AGG, CGA, CGC, CGT, CGG, TGA, TGC, TGT, TGG, GGA, GGC, GGT, or GGG PAMs. PPDV is the PAM frequency after Cas9 cutting/frequency of input library, wherein lower numbers signify more active Cas9 proteins.

[0038] FIG. 32 shows the location of frequently mutagenized residues by PAM selection. Positions commonly mutated in SpCas9 variants obtained when evolving on NAN PAMs include: D1135, E1219, D1332.

[0039] FIGS. 33A-33D show C to T base editing with evolved variants on PAMs. C to T base editing with SpCas9 variants were incorporated into Be4MAX architecture in HEK293T cells. FIG. 33A shows C to T base editing with NAA PAMs. FIG. 33B shows C to T base editing with NAC PAMs. FIG. 33C shows C to T base editing with NAT PAMs. FIG. 33D shows C to T base editing with NAG PAMs. Each bar represents the average of 3 independent experiments, and the error bars represents the standard deviation. The “es” SpCas9 variant protein works best on NARH PAMs, with some activity on NARG and NGN PAMS, the “fn” SpCas9 variant protein works best on NRCH PAMs, with some activity on NRCG and NGN PAMs, and the “ax” SpCas9 variant protein works best on NRTH PAMs, with some activity on NRTG and NGN PAMs.

[0040] FIGS. 34A-34B show C to T base editing with evolved SpCas9 variants on PAMs. C to T base editing with SpCas9 variants were incorporated into BE4MAX architecture in HEK293T cells. FIG. 34A shows C to T base editing on NAA, NAC, and NAT PAMs. FIG. 34B shows C to T base editing on NAAH, NACH, and NATH PAMs, where H is any base except for G. Each bar represents the average of 3 independent experiments, and the error bars represents the standard deviation.

[0041] FIGS. 35A-35C show A to G base editing with evolved SpCas9 variants on PAMs. A to G base editing with SpCas9 variants incorporated into ABEMAX architecture in HEK293T cells. FIG. 35A shows A to G base editing on NAA/NGA PAMs with es variant SpCas9. FIG. 35B shows A to G base editing on NAC/NGC PAMs with fn variant SpCas9. FIG. 35C shows A to G base editing on NAG/NGG PAMs with es and fn variant SpCas9 proteins. Each bar represents the average of 2 independent experiments, and the error bars represent the standard deviation.

[0042] FIG. 36 show phage-assisted non-continuous evolution (PANCE) of SpCas9 binding activity on non-G PAMs. (A) Original selection scheme for Cas9 DNA binding. w-dSpCas9 expressed by DgIII selection phage (SP) binds to a designated protospacer/PAM sequence upstream of gIII on an accessory plasmid (AP) in host E. coli cells. Host cells and infecting SP are continuously mutagenized by a mutagenesis plasmid (MP). (B) Fold propagation of SP expressing w-dSpCas9 or w-dxCas9 on APs encoding each of all 64 NNN PAM sequences upstream of gIII. (C) Schematic overview of PANCE workflow. Host cells containing an AP and MP are grown to log phase in a deep well plate or tube before being infected with SP. Mutagenesis is induced and SP are allowed to propagate for 6-18 hours before cells are pelleted and the SP-containing supernatant is collected. The SP pool is then used to infect host cells in the next iteration of PANCE. (D) Consensus mutations arising from evolution of w-dSpCas9 (N1) or w-dxCas9 (N2) on NAA (red), NAT (blue), or NAC (green) PAM sequences.

[0043] FIGS. 37A-37E shows multiple new PACE schemes utilizing a split-intein Cas9 and/or two protospacers. FIG. 37A shows new PACE schemes to limit the concentration of spCas9 protein and/or increase the number of Cas9 binding sites. FIG. 37B shows SpCas9 individual NAA mutations for each of the listed clones (e.g., N3.GAA-3, N3.GAA-4, etc.), are shown as compared to SpCas9 protein. FIG. 37C shows a timecourse of the NAA variants from FIG. 37B through evolution. FIG. 37D shows SpCas9 individual NAC mutations for each of the listed clones (e.g., N4.CAC-1, N4.CAC-5, etc.), are shown as compared to SpCas9 protein. Also shown is D1135N, R1114G, V1139A, E1219V, Q1221H, R1320V, and R1333K mapped to the SpCas9 crystal structure 4un3. FIG. 37E shows SpCas9 individual NAT mutations for each of the listed clones (e.g., SacB.N4.TAT-1, SacB.N4-TAT-3, etc.), are shown as compared to SpCas9 protein. Also shown is D1135N, R1114G, E1219V, H1349R, S1338T, R1335Q, and D1332N mapped to the SpCas9 crystal structure 4un3 (left, lower structure). The lower right structure also shows D1135N, R1114G, E1219V, G1218S, Q1221H, P1321S, R1335, and D1332G mapped to the SpCas9 crystal structure 4un3.

[0044] FIGS. 38A-38D show characterization of evolved variants and SpCas9-NG through bacterial PAM depletion and mammalian cell indel formation. FIG. 38A shows bacterial PAM depletion of SpCas9-NRRH, -NRTH, -NRCH, and SpCas9-NG using a bacterial NNNN PAM library. The inverse of the depletion score was used to generate enrichment scores of activity on each NNNN PAM, which were then used to create sequence logos (WebLogo3.0). FIG. 38B shows indel formation in HEK293T cells across 64 endogenous mammalian sites containing NANN PAMs for SpCas9-NRRH, -NRTH, -NRCH, and SpCas9-NG. Mean and SE of three independent biological replicates are shown. FIG. 38C provides a summary of indel formation efficiencies in HEK293T cells across 48 endogenous mammalian sites containing NANH (H=non-G) PAMs for SpCas9-NRRH, -NRTH, -NRCH, and SpCas9-NG. Mean and standard deviation (SD) of all individual values of three independent biological replicates are plotted. FIG. 38D shows DNA targeting specificity of SpCas9, xCas9, and evolved variants SpCas9-NRRH, -NRTH-, and NRCH as determined by % on-target reads resulting from GUIDE-seq analysis using HEK target site 4 in U20S cells.

[0045] FIG. 39A-39E show mammalian C to T and A to G base editing activity of evolved variants and SpCas9-NG. FIG. 39A shows cytosine base editing in HEK293T cells across 64 endogenous mammalian sites containing NANN PAMs for BE4-NRRH, BE4-NRTH, BE4-NRCH, and BE4-NG. Mean and SE of three independent biological replicates are shown. FIG. 39B shows a summary of cytosine base editing in HEK293T cells across 48 endogenous mammalian sites containing NANH (H=non-G) PAMs for BE4-NRRH, BE4-NRTH, BE4-NRCH, and BE4-NG. Mean and SE of three independent biological replicates are shown. FIG. 39C shows adenine base editing in HEK293T cells across 27 endogenous mammalian sites containing NANN PAMs for ABE-NRRH, ABE-NRTH, ABE-NRCH, and ABE-NG. Mean and SE of three independent biological replicates are shown. FIG. 39D shows the fraction of pathogenic SNPs in the ClinVar Database that could in principle be corrected by a C⋅G to T⋅A (left) or A⋅T to G⋅C (right) base conversion using NR PAMs. FIG. 39E shows the number of possible sgRNAs capable of targeting pathogenic SNPs in the ClinVar Database using NR, NG, or NGG PAMs.

[0046] FIGS. 40A-40G shows a characterization of PAM preferences using a genomically integrated human cell base editing target sequence library. FIG. 40A is a schematic overview of a mammalian cell base editing library experiment. A library of matched sgRNA/protospacer target sites spanning all NNNN PAMs is stably genomically integrated in HEK293T cells. Library cells are then transfected with and selected for genomic integration of plasmids encoding BE4 variants. After antibiotic selection, cells are lysed and the integration of plasmids encoding BE4 variants. After antibiotic selection, cells are lysed and the integrated sgRNA/protospacer site is PCR amplified for HTS analysis. FIG. 40B provides a heat map of base editing activity on the NNNN PAM library in HEK293T cells, with positions 2, 3, and 4 of the PAM defined. For each construct, the mean editing across all sites containing the designated PAM over two independent biological replicates, internally normalized against the highest editing value for each construct, is shown.

[0047] FIG. 40C-E shows the average base editing activity on the NNNN PAM library in HEK293T cells by BE4, BE4-NRRH, BE4-NRTH, and BE4-NRCH, with PAM positions 2 (C), position 3 (D), or position 4 (E) fixed. Mean and SE for individual editing values (averaged across two independent biological replicates) at all relevant library sequences are shown. FIG. 40F-40G show the effect of sgRNA length and 5′G mismatches on the base editing efficiency of profiled SpCas9 variants. The percentage decrease of editing efficiency from using a 21 nt sgRNA with either a matched (F) or mismatched (G) 5′G compared to using a matched 20 nt sgRNA is shown for BE4, BE4-NRRH, BE4-NRCH, BE4-NRTH, and BE4-NG on all library sequences containing NAN, NRN, NGN, or NGG PAMs. The mean and SE are plotted.

[0048] FIG. 41A-41C shows evolved SpCas9 variants allow correction of pathogenic SNPs using non-G PAMs. FIG. 41A provides an overview of adenine base editing strategy for correcting the sickle hemoglobin (HbS) SNP. In HbS, the Glu (GAG codon) at position 6 of normal b-globin (HBB) is mutated to a Val (GTG codon). Targeting this SNP with A·T to G·C base editing on the reverse strand enables a Val to Ala (GTG to GCG) base conversion, leading to the Makassar b-globin variant (HbG) which produces phenotypically normal b-globin. FIG. 41B shows A·T to G·C base editing in HEK293T cells engineered with the HbS mutation using a CACC PAM by ABE-NRRH, ABE-NRTH, ABE-NRCH, and ABE-NG. This PAM places the target A at position 7, and an off-target A, which leads to a silent pro (CCT) to pro (CCC) mutation, at position 9. Mean and SE of three independent biological replicates are shown. FIG. 41C shows A·T to G·C base editing in HEK293T cells engineered with the HbS mutation using a CATG PAM by ABE-NRRH, ABE-NRTH, ABE-NRCH, and ABE-NG. This PAM places the target A at position 4, and an off-target A, which leads to a silent pro (CCT) to pro (CCC) mutation, at position 6. Mean and SE of three independent biological replicates are shown.

[0049] FIG. 42 provides a table of NRNN PAM targeting potential by SpCas9 and SaCs9 variants described herein. The variants SpCas9-NRRH, SpCas9-NRTH, and SpCas9-NRCH are disclosed and discussed herein.

[0050] FIG. 43A-43F depicts additional details of Cas9:DNA binding PACE and Cas9 nuclease selections. FIG. 43A shows dual AP selection where \acute{ω}-dSpCas9 binds two distinct protospacer/PAM sequences to drive either half of split-intein pIII. FIG. 43B shows split-intein Cas9 limits total Cas9 concentration in host cells, thus avoiding saturation of protospacer/PAM binding sites. Residues 574-1368 of Cas9 fused to NpuC is expressed by AgIII SP and \acute{ω}-dSpCas9(1-573) fused to NpuN is encoded on a low copy complimentary plasmid (CP) in host cells. FIG. 43C shows a combination of the selection principles from (A) and (B) through use of gVI as an additional PACE-compatible selection marker for phage propagation and ΔgIIIΔgVI SP. FIG. 43D shows overnight propagation assay of selection phage (SP) encoding dSpCas9C on host cells containing a complimentary plasmid (CP) providing either \acute{ω}-dSpCas9_{N} or \acute{ω}-dSpCas9_{N-mut} and an AP encoding either a AAA or CAA PAM. FIGS. 43E and 43F show a scheme of survival based selection for Cas9 nuclease activity. Cells containing a high-copy selection plasmid encoding a protospacer/PAM sequence, sfGFP, and the conditionally lethal protein SacB are transformed with a library of nuclease-active Cas9s encoded on a low-copy plasmid that also includes the matching sgRNA. Binding and cleavage of the designated PAM/protospacer by Cas9 leads to destruction of the selection plasmid, resulting in loss of both sfGFP and SacB expression, allowing cells to survive on sucrose-containing media.

[0051] FIG. 44A-44C show the effects of mutations on PAM recognition by SpCas9 variants. FIG. 44A shows the addition of the Y1131C mutation, which was enriched in the later phases of the NAT evolution trajectory, inactivates BE3-NRTH in HEK293T cells. Mean and SE of three independent biological replicates are shown. FIG. 44B shows the N-terminal mutations of SpCas9-NRRH, -NRCH, and -NRTH mapped to the SpCas9 crystal structure (4UN3). FIG. 44C shows CBE activity of BE3-NRRH, BE3-NRTH, and BE3-NRCH with and without the N-terminal mutations shown in (B) in HEK293T cells. Mean and SE of three independent biological replicates are shown.

[0052] FIG. 45A-45D is a characterization of SpCas9, xCas9, and evolved variants (SpCa9-NRTH, SpCas9-NRCH, and SpCas9-NRRH) in bacterial PAM depletion and mammalian indel formation experiments. FIG. 45A shows bacterial PAM depletion of SpCas9-NRRH, -NRCH, -NRTH, and SpCas9-NG on a bacterial NNNN PAM library with 1 h, 3 h, and overnight Cas9 induction. The inverse of the depletion score was used to generate enrichment scores of activity on each NNNN PAM, which were then used to create sequence logos (WebLogo3.0). FIG. 45B shows indel formation in HEK293T cells across endogenous mammalian sites containing NANN PAMs for xCas9, SpCas9-NRRH, -NRTH, -NRCH, and SpCas9-NG. Mean and SE of three independent biological replicates are shown. FIG. 45C shows indel formation in HEK293T cells across endogenous mammalian sites containing NGNN PAMs for SpCas9-NRRH, -NRTH, -NRCH, SpCas9-NG, and SpCas9. Mean and SE of three independent biological replicates are shown. FIG. 45D shows GUIDE-seq analysis of SpCas9, xCas9, and evolved variants SpCas9-NRRH, -NRTH, and -NRCH targeting HEK site 4 in U2OS cells. GUIDE-seq on-target (indicated by the asterisk) and off-target reads that are greater than or equal to 1% total reads are shown.

[0053] FIG. 46A-46C shows the characterization of SpCas9 (BE4), SpCas9-NG (BE4-NG), and evolved CBE and ABE variants in mammalian base editing experiments. FIG. 46A shows CBE in HEK293T cells across endogenous mammalian sites containing NGNN PAMs for BE4-NRRH, BE4-NRTH, BE4-NRCH, BE4-NG, and BE4. Mean and SE of three independent biological replicates are shown. FIG. 46B shows ABE in HEK293T cells across endogenous mammalian sites containing NGNN PAMs for ABE-NRRH, ABE-NRTH, ABE-NRCH, and ABE-NG. Mean and SE of three independent biological replicates are shown. For target sites with NGA, NGC, and NGT PAMs, only ABE-NRRH, ABE-NRTH, and ABE-NRCH are shown, respectively, in addition to SpCas9-NG.

[0054] FIG. 46C shows the fraction of pathogenic SNPs in the ClinVar Database with either a single targetable base within the window or multiple targetable bases that could in principle be corrected by a C⋅G to T⋅A (top left) or A⋅T to G⋅C (top right) base conversion using NR PAMs or C⋅G to T⋅A (bottom left) or A⋅T to G⋅C (bottom right) base conversion using NG PAMs.

[0055] FIG. 47A-47D shows the characterization of PAM preferences of BE4, BE4-NRRH, BE4-NRCH, and BE4-NG using a genomically integrated human cell base editing target sequence library FIG. 47A shows the distribution of the number of target sites per PAM within the integrated sgRNA library. FIG. 47B shows the PAM preferences for BE4, BE4-NRRH, BE4-NRTH, and BE4-NRCH as determined by base editing on the target sequence library integrated in HEK293T cells. Sequence logos for each construct were created from the CBE activity on each NNNN PAM contained in the library (WebLogo3.0). FIG. 47C Average base editing activity on the NNNN PAM library in HEK293T cells by BE4, BE4-NRRH, BE4-NRTH, and BE4-NRCH, with PAM position 1 fixed. Mean and SE for individual editing values (averaged across two independent biological replicates) at all relevant library sequences are shown. FIG. 47C-47D shows effect of sgRNA length and 5′G mismatch on base editing efficiency of profiled SpCas9 variants. Average base editing on the NNNN PAM library in HEK293T cells by BE4, BE4-NRRH, BE4-NRTH, and BE4-NRCH is grouped by sites containing a 20-nt sgRNA with a 5′G matched to the target sequence, a 21-nt sgRNA with a 5′G matched to the target sequence, or a 21-nt sgRNA with a mismatched 5′ nucleotide. Average editing activity of constructs on NGN (FIG. 47D), NAN (FIG. 47E), and NGG (FIG. 47F) PAMs are shown. Mean and SE for individual editing values (averaged across two independent biological replicates) at all relevant library sequences are shown. ns, not significant; *, p<0.05; **, p<0.01; ***, p<0.001 (Student's t test).

[0056] FIG. 48A-48C shows high-throughput sequencing analysis of sickle cell locus editing by SpCas9 variant-derived ABEs. FIG. 48A shows Crispresso2 output showing the HbS mutation in a engineered HEK293T cell line. HEK293T cells were treated with nickase-SpCas9, sgRNA (binding shown in grey), and ssODN containing the point mutation. After two rounds of transfection, sorting, and growth, the cell line sequenced above was isolated and identified to have 100% conversion to the sickle cell anemia allele. FIG. 48B shows Crispresso2 output showing ABE activity of ABE-NRRH, ABE-NRTH, ABE-NRCH, and ABE-NG in HbS engineered HEK293T cells using a sgRNA (gray bar) targeting a CATG PAM. FIG. 48C shows Crispresso2 output showing ABE activity of ABE-NRRH, ABE-NRTH, ABE-NRCH, and ABE-NG in HbS engineered HEK293T cells using a sgRNA (gray bar) targeting a CACC PAM.

### DEFINITIONS

[0057] As used herein and in the claims, the singular forms “a,” “an,” and “the” include the singular and the plural reference unless the context clearly indicates otherwise. Thus, for example, a reference to “an agent” includes a single agent and a plurality of such agents.

[0058] The term “base editor (BE),” or “nucleobase editor (NBE),” as used herein, refers to an agent comprising a polypeptide that is capable of making a modification to a base (e.g., A, T, C, G, or U) within a nucleic acid sequence (e.g., DNA or RNA). In some embodiments, the base editor is capable of deaminating a base within a nucleic acid. In some embodiments, the base editor is capable of deaminating a base within a DNA molecule. In some embodiments, the base editor is capable of deaminating a cytosine (C) in DNA. In some embodiments, the base editor is a fusion protein comprising a nucleic acid programmable DNA binding protein fused to a nucleic acid editing domain. In some embodiments, the base editor is a fusion protein comprising a nucleic acid programmable DNA binding protein (napDNAbp) fused to a cytidine deaminase domain. In some embodiments, the base editor comprises a Cas9 domain (e.g., an evolved Cas9 domain), or an evolved version of a CasX, CasY, Cpf1, C2c1, C2c2, C2c3, or Argonaute protein that comprises one or more mutations homologous to the mutations provided herein fused to a cytidine deaminase. In some embodiments, the base editor comprises a Cas9 nickase (Cas9n) fused to an cytidine deaminase domain. In some embodiments, the base editor comprises a nuclease-inactive Cas9 (dCas9) fused to a cytidine deaminase domain. In some embodiments, the base editor includes an inhibitor of base excision repair, for example, a UGI domain or a dISN domain.

[0059] In some embodiments, the base editor is capable of deaminating an adenosine (A) in DNA. In some embodiments, the base editor is a fusion protein comprising a nucleic acid programmable DNA binding protein fused to a nucleic acid editing domain. In some embodiments, the base editor is a fusion protein comprising a nucleic acid programmable DNA binding protein (napDNAbp) fused to an adenosine deaminase domain. In some embodiments, the base editor is a fusion protein comprising a nucleic acid programmable DNA binding protein (napDNAbp) fused to one or more adenosine deaminase domains. In some embodiments, the base editor is a fusion protein comprising a nucleic acid programmable DNA binding protein (napDNAbp) fused to two adenosine deaminase domains. In some embodiments, the base editor comprises a Cas9 (e.g., an evolvedCas9 domain), or an evolved version of a CasX, CasY, Cpf1, C2c1, C2c2, C2c3, or Argonaute protein that comprises one or more mutations homologous to the mutations provided herein fused to an adenosine deaminase domain. In some embodiments, the base editor comprises a Cas9 nickase (Cas9n) fused to an adenosine deaminase domain. In some embodiments, the base editor comprises a Cas9 nickase (Cas9n) fused to two adenosine deaminase domains. In some embodiments, the base editor comprises a nuclease-inactive Cas9 (dCas9) fused to an adenosine deaminase domain. In some embodiments, the base editor comprises a nuclease-inactive Cas9 (dCas9) fused to two adenosine deaminase domains. In some embodiments, the base editor is fused to an inhibitor of base excision repair, for example, a UGI domain, or a dISN domain.

[0060] The term “nucleic acid programmable DNA binding protein” or “napDNAbp” refers to a protein that associates with a nucleic acid (e.g., DNA or RNA), such as a guide nucleic acid (e.g., gRNA), that guides the napDNAbp to a specific nucleic acid sequence, for example, by hybridizing to the target nucleic acid sequence. For example, a Cas9 domain can associate with a guide RNA that guides the Cas9 domain to a specific DNA sequence that has complementary to the guide RNA. In some embodiments, the napDNAbp is a class 2 microbial CRISPR-Cas effector. In some embodiments, the napDNAbp is a Cas9 domain, for example, a nuclease active Cas9, a Cas9 nickase (Cas9n), or a nuclease inactive Cas9 (dCas9). Examples of nucleic acid programmable DNA binding proteins include, without limitation, Cas9 (e.g., an evolved Cas9 domain), or an evolved version of a CasX, CasY, Cpf1, C2c1, C2c2, C2c3, or Argonaute protein that comprises one or more mutations homologous to the mutations provided herein. It should be appreciated, however, that nucleic acid programmable DNA binding proteins also include nucleic acid programmable proteins that bind RNA. For example, the napDNAbp may be associated with a nucleic acid that guides the napDNAbp to an RNA. Other nucleic acid programmable DNA binding proteins are also within the scope of this disclosure, though they may not be specifically described in this Application.

[0061] As used herein, the term “circular permutant” refers to a protein or polypeptide (e.g., a Cas9) comprising a circular permutation, which is change in the protein's structural configuration involving a change in order of amino acids appearing in the protein's amino acid sequence. In other words, circular permutants are proteins that have altered N- and C-termini as compared to a wild-type counterpart, e.g., the wild-type C-terminal half of a protein becomes the new N-terminal half. Circular permutation (or CP) is essentially the topological rearrangement of a protein's primary sequence, connecting its N- and C-terminus, often with a peptide linker, while concurrently splitting its sequence at a different position to create new, adjacent N- and C-termini. The result is a protein structure with different connectivity, but which often can have the same overall similar three-dimensional (3D) shape, and possibly include improved or altered characteristics, including, reduced proteolytic susceptibility, improved catalytic activity, altered substrate or ligand binding, and/or improved thermostability. Circular permutant proteins can occur in nature (e.g., concanavalin A and lectin). In addition, circular permutation can occur as a result of posttranslational modifications or may be engineered using recombinant techniques.

[0062] The term “circularly permuted Cas9” refers to any Cas9 protein, or variant thereof, that has been occurs as a circular permutant, whereby its N- and C-termini have been topically rearranged. Such circularly permuted Cas9 proteins (“CP-Cas9”), or variants thereof, retain the ability to bind DNA when complexed with a guide RNA (gRNA). See, Oakes et al., “Protein Engineering of Cas9 for enhanced function,” Methods Enzymol, 2014, 546: 491-511 and Oakes et al., “CRISPR-Cas9 Circular Permutants as Programmable Scaffolds for Genome Modification,” Cell, Jan. 10, 2019, 176: 254-267, each of are incorporated herein by reference. The instant disclosure contemplates any previously known CP-Cas9 or use a new CP-Cas9 so long as the resulting circularly permuted protein retains the ability to bind DNA when complexed with a guide RNA (gRNA).

[0063] In some embodiments, the napDNAbp is an “RNA-programmable nuclease” or “RNA-guided nuclease.” The terms are used interchangeably herein and refer to a nuclease that forms a complex with (e.g., binds or associates with) one or more RNA(s) that is not a target for cleavage. In some embodiments, an RNA-programmable nuclease, when in a complex with an RNA, may be referred to as a nuclease:RNA complex. Typically, the bound RNA(s) is referred to as a guide RNA (gRNA). Guide RNAs can exist as a complex of two or more RNAs, or as a single RNA molecule. Guide RNAs that exist as a single RNA molecule may be referred to as single-guide RNAs (sgRNAs), though “gRNA” is also used to refer to guide RNAs that exist as either single molecules or as a complex of two or more molecules. Typically, gRNAs that exist as a single RNA species comprise two domains: (1) a domain that shares homology to a target nucleic acid (i.e., directs binding of a Cas9 complex to the target); and (2) a domain that binds a Cas9 domain. In some embodiments, domain (2) corresponds to a sequence known as a tracrRNA and comprises a stem-loop structure. In some embodiments, domain (2) is identical or homologous to a tracrRNA as provided in Jinek et al., Science 337:816-821 (2012), the entire contents of which is incorporated herein by reference. Other examples of gRNAs (e.g., those including domain 2) can be found in International Patent Application PCT/US2014/054252, filed Sep. 5, 2014, entitled “Switchable Cas9 Nucleases And Uses Thereof,” and International Patent Application PCT/US2014/054247, filed Sep. 5, 2014, entitled “Delivery System For Functional Nucleases,” the entire contents of each are hereby incorporated by reference in their entirety. In some embodiments, a gRNA comprises two or more of domains (1) and (2), and may be referred to as an “extended gRNA.” For example, an extended gRNA will bind two or more Cas9 domains and bind a target nucleic acid at two or more distinct regions, as described herein. The gRNA comprises a nucleotide sequence that complements a target site, which mediates binding of the nuclease/RNA complex to said target site, providing the sequence specificity of the nuclease:RNA complex. In some embodiments, the RNA-programmable nuclease is the (CRISPR-associated system) Cas9 endonuclease, for example, Cas9 (also known as Csn1) from Streptococcus pyogenes (see, e.g., “Complete genome sequence of an M1 strain of Streptococcus pyogenes.” Ferretti J. J., McShan W. M., Ajdic D. J., Savic D. J., Savic G., Lyon K., Primeaux C., Sezate S., Suvorov A. N., Kenton S., Lai H. S., Lin S. P., Qian Y., Jia H. G., Najar F. Z., Ren Q., Zhu H., Song L., White J., Yuan X., Clifton S. W., Roe B. A., McLaughlin R. E., Proc. Natl. Acad. Sci. U.S.A. 98:4658-4663 (2001); “CRISPR RNA maturation by trans-encoded small RNA and host factor RNase III.” Deltcheva E., Chylinski K., Sharma C. M., Gonzales K., Chao Y., Pirzada Z. A., Eckert M. R., Vogel J., Charpentier E., Nature 471:602-607 (2011); and “A programmable dual-RNA-guided DNA endonuclease in adaptive bacterial immunity.” Jinek M., Chylinski K., Fonfara I., Hauer M., Doudna J. A., Charpentier E. Science 337:816-821 (2012), the entire contents of each of which are incorporated herein by reference).

[0064] Because RNA-programmable nucleases (e.g., Cas9) use RNA:DNA hybridization to target DNA cleavage sites, these proteins are able to target, in principle, any sequence specified by the guide RNA. Methods of using RNA-programmable nucleases, such as Cas9, for site-specific cleavage (e.g., to modify a genome) are known in the art (see e.g., Cong, L. et al., Multiplex genome engineering using CRISPR/Cas systems. Science 339, 819-823 (2013); Mali, P. et al., RNA-guided human genome engineering via Cas9. Science 339, 823-826 (2013); Hwang, W. Y. et al., Efficient genome editing in zebrafish using a CRISPR-Cas system. Nature biotechnology 31, 227-229 (2013); Jinek, M. et al. RNA-programmed genome editing in human cells. eLife 2, e00471 (2013); Dicarlo, J. E. et al., Genome engineering in Saccharomyces cerevisiae using CRISPR-Cas systems. Nucleic Acids Research (2013); Jiang, W. et al., RNA-guided editing of bacterial genomes using CRISPR-Cas systems. Nature Biotechnology 31, 233-239 (2013); the entire contents of each of which are incorporated herein by reference).

[0065] In general, a “CRISPR system” refers collectively to transcripts and other elements involved in the expression of or directing the activity of CRISPR-associated (“Cas”) genes, including sequences encoding a Cas gene, a tracr (trans-activating CRISPR) sequence (e.g. tracrRNA or an active partial tracrRNA), a tracr mate sequence (encompassing a “direct repeat” and a tracrRNA-processed partial direct repeat in the context of an endogenous CRISPR system), a guide sequence (also referred to as a “spacer” in the context of an endogenous CRISPR system), or other sequences and transcripts from a CRISPR locus. The tracrRNA of the system is complementary (fully or partially) to the tracr mate sequence present on the guide RNA.

[0066] The term “Cas9” or “Cas9 nuclease” refers to an RNA-guided nuclease comprising a Cas9 domain, or a fragment thereof (e.g., a protein comprising an active or inactive DNA cleavage domain of Cas9, and/or the gRNA binding domain of Cas9). A “Cas9 domain” as used herein, is a protein fragment comprising an active or inactive cleavage domain of Cas9 and/or the gRNA binding domain of Cas9. A “Cas9 protein” is a full length Cas9 protein. A Cas9 nuclease is also referred to sometimes as a casn1 nuclease or a CRISPR (Clustered Regularly Interspaced Short Palindromic Repeat)-associated nuclease. CRISPR is an adaptive immune system that provides protection against mobile genetic elements (viruses, transposable elements, and conjugative plasmids). CRISPR clusters contain spacers, sequences complementary to antecedent mobile elements, and target invading nucleic acids. CRISPR clusters are transcribed and processed into CRISPR RNA (crRNA). In type II CRISPR systems correct processing of pre-crRNA requires a trans-encoded small RNA (tracrRNA), endogenous ribonuclease 3 (rnc) and a Cas9 domain. The tracrRNA serves as a guide for ribonuclease 3-aided processing of pre-crRNA. Subsequently, Cas9/crRNA/tracrRNA endonucleolytically cleaves linear or circular dsDNA target complementary to the spacer. The target strand not complementary to crRNA is first cut endonucleolytically, then trimmed 3′-5′ exonucleolytically. In nature, DNA-binding and cleavage typically requires protein and both RNAs. However, single guide RNAs (“sgRNA”, or simply “gNRA”) can be engineered so as to incorporate aspects of both the crRNA and tracrRNA into a single RNA species. See, e.g., Jinek M., Chylinski K., Fonfara I., Hauer M., Doudna J. A., Charpentier E. Science 337:816-821(2012), the entire contents of which are hereby incorporated by reference. Cas9 recognizes a short motif in the CRISPR repeat sequences (the PAM or protospacer adjacent motif) to help distinguish self versus non-self. Cas9 nuclease sequences and structures are well known to those of skill in the art (see, e.g., “Complete genome sequence of an M1 strain of Streptococcus pyogenes.” Ferretti et al., J. J., McShan W. M., Ajdic D. J., Savic D. J., Savic G., Lyon K., Primeaux C., Sezate S., Suvorov A. N., Kenton S., Lai H. S., Lin S. P., Qian Y., Jia H. G., Najar F. Z., Ren Q., Zhu H., Song L., White J., Yuan X., Clifton S. W., Roe B. A., McLaughlin R. E., Proc. Natl. Acad. Sci. U.S.A. 98:4658-4663(2001); “CRISPR RNA maturation by trans-encoded small RNA and host factor RNase III.” Deltcheva E., Chylinski K., Sharma C. M., Gonzales K., Chao Y., Pirzada Z. A., Eckert M. R., Vogel J., Charpentier E., Nature 471:602-607(2011); and “A programmable dual-RNA-guided DNA endonuclease in adaptive bacterial immunity.” Jinek M., Chylinski K., Fonfara I., Hauer M., Doudna J. A., Charpentier E. Science 337:816-821(2012), the entire contents of each of which are incorporated herein by reference). Cas9 orthologs have been described in various species, including, but not limited to, S. pyogenes and S. thermophilus. Additional suitable Cas9 nucleases and sequences will be apparent to those of skill in the art based on this disclosure, and such Cas9 nucleases and sequences include Cas9 sequences from the organisms and loci disclosed in Chylinski, Rhun, and Charpentier, “The tracrRNA and Cas9 families of type II CRISPR-Cas immunity systems” (2013) RNA Biology 10:5, 726-737; the entire contents of which are incorporated herein by reference. In some embodiments, a Cas9 nuclease comprises one or more mutations that partially impair or inactivate the DNA cleavage domain.

[0067] A nuclease-inactivated Cas9 domain may interchangeably be referred to as a “dCas9” protein (for nuclease-“dead” Cas9). Methods for generating a Cas9 domain (or a fragment thereof) having an inactive DNA cleavage domain are known (see, e.g., Jinek et al., Science. 337:816-821(2012); Qi et al., “Repurposing CRISPR as an RNA-Guided Platform for Sequence-Specific Control of Gene Expression” (2013) Cell. 28; 152(5):1173-83, the entire contents of each of which are incorporated herein by reference). For example, the DNA cleavage domain of Cas9 is known to include two subdomains, the HNH nuclease subdomain and the RuvC1 subdomain. The HNH subdomain cleaves the strand complementary to the gRNA, whereas the RuvC1 subdomain cleaves the non-complementary strand. Mutations within these subdomains can silence the nuclease activity of Cas9. For example, the mutations D10A and H840A completely inactivate the nuclease activity of S. pyogenes Cas9 (Jinek et al., Science. 337:816-821(2012); Qi et al., Cell. 28; 152(5):1173-83 (2013)). In some embodiments, proteins comprising fragments of Cas9 are provided. For example, in some embodiments, a protein comprises one of two Cas9 domains: (1) the gRNA binding domain of Cas9; or (2) the DNA cleavage domain of Cas9. In some embodiments, proteins comprising Cas9 or fragments thereof are referred to as “Cas9 variants.” A Cas9 variant shares homology to Cas9, or a fragment thereof. For example, a Cas9 variant is at least about 70% identical, at least about 80% identical, at least about 90% identical, at least about 95% identical, at least about 96% identical, at least about 97% identical, at least about 98% identical, at least about 99% identical, at least about 99.5% identical, at least about 99.8% identical, or at least about 99.9% identical to wild type Cas9 (e.g., SpCas9 of SEQ ID NO: 2). In some embodiments, the Cas9 variant may have 1, 2, 3, 4, 5, 6, 7, 8, 9, 10, 11, 12, 13, 14, 15, 16, 17, 18, 19, 20, 21, 22, 21, 24, 25, 26, 27, 28, 29, 30, 31, 32, 33, 34, 35, 36, 37, 38, 39, 40, 41, 42, 43, 44, 45, 46, 47, 48, 49, 50, or more amino acid changes compared to wild type Cas9 (e.g., SpCas9 of SEQ ID NO: 2). In some embodiments, the Cas9 variant comprises a fragment of Cas9 (e.g., a gRNA binding domain or a DNA-cleavage domain), such that the fragment is at least about 70% identical, at least about 80% identical, at least about 90% identical, at least about 95% identical, at least about 96% identical, at least about 97% identical, at least about 98% identical, at least about 99% identical, at least about 99.5% identical, or at least about 99.9% identical to the corresponding fragment of wild type Cas9 (e.g., SpCas9 of SEQ ID NO: 2). In some embodiments, the fragment is at least 30%, at least 35%, at least 40%, at least 45%, at least 50%, at least 55%, at least 60%, at least 65%, at least 70%, at least 75%, at least 80%, at least 85%, at least 90%, at least 95% identical, at least 96%, at least 97%, at least 98%, at least 99%, or at least 99.5% of the amino acid length of a corresponding wild type Cas9 (e.g., SpCas9 of SEQ ID NO: 2).

[0068] In some embodiments, proteins comprising fragments of Cas9 are provided. In some embodiments, the fragment is at least 100 amino acids in length. In some embodiments, the fragment is at least 100, 150, 200, 250, 300, 350, 400, 450, 500, 550, 600, 650, 700, 750, 800, 850, 900, 950, 1000, 1050, 1100, 1150, 1200, 1250, or at least 1300 amino acids in length. For example, in some embodiments, a protein comprises one of two Cas9 domains: (1) the gRNA binding domain of Cas9; or (2) the DNA cleavage domain of Cas9. In some embodiments, proteins comprising Cas9 or fragments thereof are referred to as “Cas9 variants.” A Cas9 variant shares homology to Cas9. For example a Cas9 variant is at least about 70% identical, at least about 80% identical, at least about 90% identical, at least about 95% identical, at least about 96% identical, at least about 97% identical, at least about 98% identical, at least about 99% identical, at least about 99.5% identical, or at least about 99.9% to wild type Cas9 (e.g., SpCas9 of SEQ ID NO: 2). In some embodiments, the Cas9 variant comprises a fragment of Cas9 (e.g., a gRNA binding domain or a DNA-cleavage domain), such that the fragment is at least about 70% identical, at least about 80% identical, at least about 90% identical, at least about 95% identical, at least about 96% identical, at least about 97% identical, at least about 98% identical, at least about 99% identical, at least about 99.5% identical, or at least about 99.9% to the corresponding fragment of wild type Cas9 (e.g., SpCas9 of SEQ ID NO: 2). In some embodiments, wild type Cas9 corresponds to Cas9 from Streptococcus pyogenes (NCBI Reference Sequence: NC_017053.1, SEQ ID NO: 1 (nucleotide); SEQ ID NO: 2 (amino acid)).

(SEQ ID NO: 1)
ATGGATAAGAAATACTCAATAGGCTTAGATATCGGCACAAATAGCGTCGGATGGGCGGTGATCACTGA
TGATTATAAGGTTCCGTCTAAAAAGTTCAAGGTTCTGGGAAATACAGACCGCCACAGTATCAAAAAAA
ATCTTATAGGGGCTCTTTTATTTGGCAGTGGAGAGACAGCGGAAGCGACTCGTCTCAAACGGACAGCT
CGTAGAAGGTATACACGTCGGAAGAATCGTATTTGTTATCTACAGGAGATTTTTTCAAATGAGATGGC
GAAAGTAGATGATAGTTTCTTTCATCGACTTGAAGAGTCTTTTTTGGTGGAAGAAGACAAGAAGCATG
AACGTCATCCTATTTTTGGAAATATAGTAGATGAAGTTGCTTATCATGAGAAATATCCAACTATCTAT
CATCTGCGAAAAAAATTGGCAGATTCTACTGATAAAGCGGATTTGCGCTTAATCTATTTGGCCTTAGC
GCATATGATTAAGTTTCGTGGTCATTTTTTGATTGAGGGAGATTTAAATCCTGATAATAGTGATGTGG
ACAAACTATTTATCCAGTTGGTACAAATCTACAATCAATTATTTGAAGAAAACCCTATTAACGCAAGT
AGAGTAGATGCTAAAGCGATTCTTTCTGCACGATTGAGTAAATCAAGACGATTAGAAAATCTCATTGC
TCAGCTCCCCGGTGAGAAGAGAAATGGCTTGTTTGGGAATCTCATTGCTTTGTCATTGGGATTGACCC
CTAATTTTAAATCAAATTTTGATTTGGCAGAAGATGCTAAATTACAGCTTTCAAAAGATACTTACGAT
GATGATTTAGATAATTTATTGGCGCAAATTGGAGATCAATATGCTGATTTGTTTTTGGCAGCTAAGAA
TTTATCAGATGCTATTTTACTTTCAGATATCCTAAGAGTAAATAGTGAAATAACTAAGGCTCCCCTAT
CAGCTTCAATGATTAAGCGCTACGATGAACATCATCAAGACTTGACTCTTTTAAAAGCTTTAGTTCGA
CAACAACTTCCAGAAAAGTATAAAGAAATCTTTTTTGATCAATCAAAAAACGGATATGCAGGTTATAT
TGATGGGGGAGCTAGCCAAGAAGAATTTTATAAATTTATCAAACCAATTTTAGAAAAAATGGATGGTA
CTGAGGAATTATTGGTGAAACTAAATCGTGAAGATTTGCTGCGCAAGCAACGGACCTTTGACAACGGC
TCTATTCCCCATCAAATTCACTTGGGTGAGCTGCATGCTATTTTGAGAAGACAAGAAGACTTTTATCC
ATTTTTAAAAGACAATCGTGAGAAGATTGAAAAAATCTTGACTTTTCGAATTCCTTATTATGTTGGTC
CATTGGCGCGTGGCAATAGTCGTTTTGCATGGATGACTCGGAAGTCTGAAGAAACAATTACCCCATGG
AATTTTGAAGAAGTTGTCGATAAAGGTGCTTCAGCTCAATCATTTATTGAACGCATGACAAACTTTGA
TAAAAATCTTCCAAATGAAAAAGTACTACCAAAACATAGTTTGCTTTATGAGTATTTTACGGTTTATA
ACGAATTGACAAAGGTCAAATATGTTACTGAGGGAATGCGAAAACCAGCATTTCTTTCAGGTGAACAG
AAGAAAGCCATTGTTGATTTACTCTTCAAAACAAATCGAAAAGTAACCGTTAAGCAATTAAAAGAAGA
TTATTTCAAAAAAATAGAATGTTTTGATAGTGTTGAAATTTCAGGAGTTGAAGATAGATTTAATGCTT
CATTAGGCGCCTACCATGATTTGCTAAAAATTATTAAAGATAAAGATTTTTTGGATAATGAAGAAAAT
GAAGATATCTTAGAGGATATTGTTTTAACATTGACCTTATTTGAAGATAGGGGGATGATTGAGGAAAG
ACTTAAAACATATGCTCACCTCTTTGATGATAAGGTGATGAAACAGCTTAAACGTCGCCGTTATACTG
GTTGGGGACGTTTGTCTCGAAAATTGATTAATGGTATTAGGGATAAGCAATCTGGCAAAACAATATTA
GATTTTTTGAAATCAGATGGTTTTGCCAATCGCAATTTTATGCAGCTGATCCATGATGATAGTTTGAC
ATTTAAAGAAGATATTCAAAAAGCACAGGTGTCTGGACAAGGCCATAGTTTACATGAACAGATTGCTA
ACTTAGCTGGCAGTCCTGCTATTAAAAAAGGTATTTTACAGACTGTAAAAATTGTTGATGAACTGGTC
AAAGTAATGGGGCATAAGCCAGAAAATATCGTTATTGAAATGGCACGTGAAAATCAGACAACTCAAAA
GGGCCAGAAAAATTCGCGAGAGCGTATGAAACGAATCGAAGAAGGTATCAAAGAATTAGGAAGTCAGA
TTCTTAAAGAGCATCCTGTTGAAAATACTCAATTGCAAAATGAAAAGCTCTATCTCTATTATCTACAA
AATGGAAGAGACATGTATGTGGACCAAGAATTAGATATTAATCGTTTAAGTGATTATGATGTCGATCA
CATTGTTCCACAAAGTTTCATTAAAGACGATTCAATAGACAATAAGGTACTAACGCGTTCTGATAAAA
ATCGTGGTAAATCGGATAACGTTCCAAGTGAAGAAGTAGTCAAAAAGATGAAAAACTATTGGAGACAA
CTTCTAAACGCCAAGTTAATCACTCAACGTAAGTTTGATAATTTAACGAAAGCTGAACGTGGAGGTTT
GAGTGAACTTGATAAAGCTGGTTTTATCAAACGCCAATTGGTTGAAACTCGCCAAATCACTAAGCATG
TGGCACAAATTTTGGATAGTCGCATGAATACTAAATACGATGAAAATGATAAACTTATTCGAGAGGTT
AAAGTGATTACCTTAAAATCTAAATTAGTTTCTGACTTCCGAAAAGATTTCCAATTCTATAAAGTACG
TGAGATTAACAATTACCATCATGCCCATGATGCGTATCTAAATGCCGTCGTTGGAACTGCTTTGATTA
AGAAATATCCAAAACTTGAATCGGAGTTTGTCTATGGTGATTATAAAGTTTATGATGTTCGTAAAATG
ATTGCTAAGTCTGAGCAAGAAATAGGCAAAGCAACCGCAAAATATTTCTTTTACTCTAATATCATGAA
CTTCTTCAAAACAGAAATTACACTTGCAAATGGAGAGATTCGCAAACGCCCTCTAATCGAAACTAATG
GGGAAACTGGAGAAATTGTCTGGGATAAAGGGCGAGATTTTGCCACAGTGCGCAAAGTATTGTCCATG
CCCCAAGTCAATATTGTCAAGAAAACAGAAGTACAGACAGGCGGATTCTCCAAGGAGTCAATTTTACC
AAAAAGAAATTCGGACAAGCTTATTGCTCGTAAAAAAGACTGGGATCCAAAAAAATATGGTGGTTTTG
ATAGTCCAACGGTAGCTTATTCAGTCCTAGTGGTTGCTAAGGTGGAAAAAGGGAAATCGAAGAAGTTA
AAATCCGTTAAAGAGTTACTAGGGATCACAATTATGGAAAGAAGTTCCTTTGAAAAAAATCCGATTGA
CTTTTTAGAAGCTAAAGGATATAAGGAAGTTAAAAAAGACTTAATCATTAAACTACCTAAATATAGTC
TTTTTGAGTTAGAAAACGGTCGTAAACGGATGCTGGCTAGTGCCGGAGAATTACAAAAAGGAAATGAG
CTGGCTCTGCCAAGCAAATATGTGAATTTTTTATATTTAGCTAGTCATTATGAAAAGTTGAAGGGTAG
TCCAGAAGATAACGAACAAAAACAATTGTTTGTGGAGCAGCATAAGCATTATTTAGATGAGATTATTG
AGCAAATCAGTGAATTTTCTAAGCGTGTTATTTTAGCAGATGCCAATTTAGATAAAGTTCTTAGTGCA
TATAACAAACATAGAGACAAACCAATACGTGAACAAGCAGAAAATAT TATTCATTTATTTACGTTGAC
GAATCTTGGAGCTCCCGCTGCTTTTAAATATTTTGATACAACAATTGATCGTAAACGATATACGTCTA
CAAAAGAAGTTTTAGATGCCACTCTTATCCATCAATCCATCACTGGTCTTTATGAAACACGCATTGAT
TTGAGTCAGCTAGGAGGTGACTGA
(SEQ ID NO: 2)
MDKKYSIGLDIGTNSVGWAVITDDYKVPSKKFKVLGNTDRHSIKKNLIGALLFGSGETAEATRLKRTA
RRRYTRRKNRICYLQEIFSNEMAKVDDSFFHRLEESFLVEEDKKHERHPIFGNIVDEVAYHEKYPTIY
HLRKKLADSTDKADLRLIYLALAHMIKFRGHFLIEGDLNPDNSDVDKLFIQLVQIYNQLFEENPINAS
RVDAKAILSARLSKSRRLENLIAQLPGEKRNGLFGNLIALSLGLTPNFKSNFDLAEDAKLQLSKDTYD
DDLDNLLAQIGDQYADLFLAAKNLSDAILLSDILRVNSEITKAPLSASMIKRYDEHHQDLTLLKALVR
QQLPEKYKEIFFDQSKNGYAGYIDGGASQEEFYKFIKPILEKMDGTEELLVKLNREDLLRKQRTFDNG
SIPHQIHLGELHAILRRQEDFYPFLKDNREKIEKILTFRIPYYVGPLARGNSRFAWMTRKSEETITPW
NFEEVVDKGASAQSFIERMTNFDKNLPNEKVLPKHSLLYEYFTVYNELTKVKYVTEGMRKPAFLSGEQ
KKAIVDLLFKTNRKVTVKQLKEDYFKKIECFDSVEISGVEDRFNASLGAYHDLLKIIKDKDFLDNEEN
EDILEDIVLTLTLFEDRGMIEERLKTYAHLFDDKVMKQLKRRRYTGWGRLSRKLINGIRDKQSGKTIL
DFLKSDGFANRNFMQLIHDDSLTFKEDIQKAQVSGQGHSLHEQIANLAGSPAIKKGILQTVKIVDELV
KVMGHKPENIVIEMARENQTTQKGQKNSRERMKRIEEGIKELGSQILKEHPVENTQLQNEKLYLYYLQ
NGRDMYVDQELDINRLSDYDVDHIVPQSFIKDDSIDNKVLTRSDKNRGKSDNVPSEEVVKKMKNYWRQ
LLNAKLITQRKFDNLTKAERGGLSELDKAGFIKRQLVETRQITKHVAQILDSRMNTKYDENDKLIREV
KVITLKSKLVSDFRKDFQFYKVREINNYHHAHDAYLNAVVGTALIKKYPKLESEFVYGDYKVYDVRKM
IAKSEQEIGKATAKYFFYSNIMNFFKTEITLANGEIRKRPLIETNGETGEIVWDKGRDFATVRKVLSM
PQVNIVKKTEVQTGGFSKESILPKRNSDKLIARKKDWDPKKYGGFDSPTVAYSVLVVAKVEKGKSKKL
KSVKELLGITIMERSSFEKNPIDFLEAKGYKEVKKDLIIKLPKYSLFELENGRKRMLASAGELQKGNE
LALPSKYVNFLYLASHYEKLKGSPEDNEQKQLFVEQHKHYLDEIIEQISEFSKRVILADANLDKVLSA
YNKHRDKPIREQAENIIHLFTLTNLGAPAAFKYFDTTIDRKRYTSTKEVLDATLIHQSITGLYETRID
LSQLGGD (encoded by SEQ ID NO: 1)
(single underline: HNH domain; double underline: RuvC domain)

[0069] In some embodiments, wild type Cas9 corresponds to, or comprises SEQ ID NO: 3 (nucleotide) and/or SEQ ID NO: 4 (amino acid):

(SEQ ID NO: 3)
ATGGATAAAAAGTATTCTATTGGTTTAGACATCGGCACTAATTCCGTTGGATGGGCTGTCATAACCGA
TGAATACAAAGTACCTTCAAAGAAATTTAAGGTGTTGGGGAACACAGACCGTCATTCGATTAAAAAGA
ATCTTATCGGTGCCCTCCTATTCGATAGTGGCGAAACGGCAGAGGCGACTCGCCTGAAACGAACCGCT
CGGAGAAGGTATACACGTCGCAAGAACCGAATATGTTACTTACAAGAAATTTTTAGCAATGAGATGGC
CAAAGTTGACGATTCTTTCTTTCACCGTTTGGAAGAGTCCTTCCTTGTCGAAGAGGACAAGAAACATG
AACGGCACCCCATCTTTGGAAACATAGTAGATGAGGTGGCATATCATGAAAAGTACCCAACGATTTAT
CACCTCAGAAAAAAGCTAGTTGACTCAACTGATAAAGCGGACCTGAGGTTAATCTACTTGGCTCTTGC
CCATATGATAAAGTTCCGTGGGCACTTTCTCATTGAGGGTGATCTAAATCCGGACAACTCGGATGTCG
ACAAACTGTTCATCCAGTTAGTACAAACCTATAATCAGTTGTTTGAAGAGAACCCTATAAATGCAAGT
GGCGTGGATGCGAAGGCTATTCTTAGCGCCCGCCTCTCTAAATCCCGACGGCTAGAAAACCTGATCGC
ACAATTACCCGGAGAGAAGAAAAATGGGTTGTTCGGTAACCTTATAGCGCTCTCACTAGGCCTGACAC
CAAATTTTAAGTCGAACTTCGACTTAGCTGAAGATGCCAAATTGCAGCTTAGTAAGGACACGTACGAT
GACGATCTCGACAATCTACTGGCACAAATTGGAGATCAGTATGCGGACTTATTTTTGGCTGCCAAAAA
CCTTAGCGATGCAATCCTCCTATCTGACATACTGAGAGTTAATACTGAGATTACCAAGGCGCCGTTAT
CCGCTTCAATGATCAAAAGGTACGATGAACATCACCAAGACTTGACACTTCTCAAGGCCCTAGTCCGT
CAGCAACTGCCTGAGAAATATAAGGAAATATTCTTTGATCAGTCGAAAAACGGGTACGCAGGTTATAT
TGACGGCGGAGCGAGTCAAGAGGAATTCTACAAGTTTATCAAACCCATATTAGAGAAGATGGATGGGA
CGGAAGAGTTGCTTGTAAAACTCAATCGCGAAGATCTACTGCGAAAGCAGCGGACTTTCGACAACGGT
AGCATTCCACATCAAATCCACTTAGGCGAATTGCATGCTATACTTAGAAGGCAGGAGGATTTTTATCC
GTTCCTCAAAGACAATCGTGAAAAGATTGAGAAAATCCTAACCTTTCGCATACCTTACTATGTGGGAC
CCCTGGCCCGAGGGAACTCTCGGTTCGCATGGATGACAAGAAAGTCCGAAGAAACGATTACTCCATGG
AATTTTGAGGAAGTTGTCGATAAAGGTGCGTCAGCTCAATCGTTCATCGAGAGGATGACCAACTTTGA
CAAGAATTTACCGAACGAAAAAGTATTGCCTAAGCACAGTTTACTTTACGAGTATTTCACAGTGTACA
ATGAACTCACGAAAGTTAAGTATGTCACTGAGGGCATGCGTAAACCCGCCTTTCTAAGCGGAGAACAG
AAGAAAGCAATAGTAGATCTGTTATTCAAGACCAACCGCAAAGTGACAGTTAAGCAATTGAAAGAGGA
CTACTTTAAGAAAATTGAATGCTTCGATTCTGTCGAGATCTCCGGGGTAGAAGATCGATTTAATGCGT
CACTTGGTACGTATCATGACCTCCTAAAGATAATTAAAGATAAGGACTTCCTGGATAACGAAGAGAAT
GAAGATATCTTAGAAGATATAGTGTTGACTCTTACCCTCTTTGAAGATCGGGAAATGATTGAGGAAAG
ACTAAAAACATACGCTCACCTGTTCGACGATAAGGTTATGAAACAGTTAAAGAGGCGTCGCTATACGG
GCTGGGGACGATTGTCGCGGAAACTTATCAACGGGATAAGAGACAAGCAAAGTGGTAAAACTATTCTC
GATTTTCTAAAGAGCGACGGCTTCGCCAATAGGAACTTTATGCAGCTGATCCATGATGACTCTTTAAC
CTTCAAAGAGGATATACAAAAGGCACAGGTTTCCGGACAAGGGGACTCATTGCACGAACATATTGCGA
ATCTTGCTGGTTCGCCAGCCATCAAAAAGGGCATACTCCAGACAGTCAAAGTAGTGGATGAGCTAGTT
AAGGTCATGGGACGTCACAAACCGGAAAACATTGTAATCGAGATGGCACGCGAAAATCAAACGACTCA
GAAGGGGCAAAAAAACAGTCGAGAGCGGATGAAGAGAATAGAAGAGGGTATTAAAGAACTGGGCAGCC
AGATCTTAAAGGAGCATCCTGTGGAAAATACCCAATTGCAGAACGAGAAACTTTACCTCTATTACCTA
CAAAATGGAAGGGACATGTATGTTGATCAGGAACTGGACATAAACCGTTTATCTGATTACGACGTCGA
TCACATTGTACCCCAATCCTTTTTGAAGGACGATTCAATCGACAATAAAGTGCTTACACGCTCGGATA
AGAACCGAGGGAAAAGTGACAATGTTCCAAGCGAGGAAGTCGTAAAGAAAATGAAGAACTATTGGCGG
CAGCTCCTAAATGCGAAACTGATAACGCAAAGAAAGTTCGATAACTTAACTAAAGCTGAGAGGGGTGG
CTTGTCTGAACTTGACAAGGCCGGATTTATTAAACGTCAGCTCGTGGAAACCCGCCAAATCACAAAGC
ATGTTGCACAGATACTAGATTCCCGAATGAATACGAAATACGACGAGAACGATAAGCTGATTCGGGAA
GTCAAAGTAATCACTTTAAAGTCAAAATTGGTGTCGGACTTCAGAAAGGATTTTCAATTCTATAAAGT
TAGGGAGATAAATAACTACCACCATGCGCACGACGCTTATCTTAATGCCGTCGTAGGGACCGCACTCA
TTAAGAAATACCCGAAGCTAGAAAGTGAGTTTGTGTATGGTGATTACAAAGTTTATGACGTCCGTAAG
ATGATCGCGAAAAGCGAACAGGAGATAGGCAAGGCTACAGCCAAATACTTCTTTTATTCTAACATTAT
GAATTTCTTTAAGACGGAAATCACTCTGGCAAACGGAGAGATACGCAAACGACCTTTAATTGAAACCA
ATGGGGAGACAGGTGAAATCGTATGGGATAAGGGCCGGGACTTCGCGACGGTGAGAAAAGTTTTGTCC
ATGCCCCAAGTCAACATAGTAAAGAAAACTGAGGTGCAGACCGGAGGGTTTTCAAAGGAATCGATTCT
TCCAAAAAGGAATAGTGATAAGCTCATCGCTCGTAAAAAGGACTGGGACCCGAAAAAGTACGGTGGCT
TCGATAGCCCTACAGTTGCCTATTCTGTCCTAGTAGTGGCAAAAGTTGAGAAGGGAAAATCCAAGAAA
CTGAAGTCAGTCAAAGAATTATTGGGGATAACGATTATGGAGCGCTCGTCTTTTGAAAAGAACCCCAT
CGACTTCCTTGAGGCGAAAGGTTACAAGGAAGTAAAAAAGGATCTCATAATTAAACTACCAAAGTATA
GTCTGTTTGAGTTAGAAAATGGCCGAAAACGGATGTTGGCTAGCGCCGGAGAGCTTCAAAAGGGGAAC
GAACTCGCACTACCGTCTAAATACGTGAATTTCCTGTATTTAGCGTCCCATTACGAGAAGTTGAAAGG
TTCACCTGAAGATAACGAACAGAAGCAACTTTTTGTTGAGCAGCACAAACATTATCTCGACGAAATCA
TAGAGCAAATTTCGGAATTCAGTAAGAGAGTCATCCTAGCTGATGCCAATCTGGACAAAGTATTAAGC
GCATACAACAAGCACAGGGATAAACCCATACGTGAGCAGGCGGAAAATATTATCCATTTGTTTACTCT
TACCAACCTCGGCGCTCCAGCCGCATTCAAGTATTTTGACACAACGATAGATCGCAAACGATACACTT
CTACCAAGGAGGTGCTAGACGCGACACTGATTCACCAATCCATCACGGGATTATATGAAACTCGGATA
GATTTGTCACAGCTTGGGGGTGACGGATCCCCCAAGAAGAAGAGGAAAGTCTCGAGCGACTACAAAGA
CCATGACGGTGATTATAAAGATCATGACATCGATTACAAGGATGACGATGACAAGGCTGCAGGA
(wild type Cas9).
(SEQ ID NO: 4)
MDKKYSIGLDIGTNSVGWAVITDEYKVPSKKFKVLGNTDRHSIKKNLIGALLFDSGETAEATRLKRTA
RRRYTRRKNRICYLQEIFSNEMAKVDDSFFHRLEESFLVEEDKKHERHPIFGNIVDEVAYHEKYPTIY
HLRKKLVDSTDKADLRLIYLALAHMIKFRGHFLIEGDLNPDNSDVDKLFIQLVQTYNQLFEENPINAS
GVDAKAILSARLSKSRRLENLIAQLPGEKKNGLFGNLIALSLGLTPNFKSNFDLAEDAKLQLSKDTYD
DDLDNLLAQIGDQYADLFLAAKNLSDAILLSDILRVNTEITKAPLSASMIKRYDEHHQDLTLLKALVR
QQLPEKYKEIFFDQSKNGYAGYIDGGASQEEFYKFIKPILEKMDGTEELLVKLNREDLLRKQRTFDNG
SIPHQIHLGELHAILRRQEDFYPFLKDNREKIEKILTFRIPYYVGPLARGNSRFAWMTRKSEETITPW
NFEEVVDKGASAQSFIERMTNFDKNLPNEKVLPKHSLLYEYFTVYNELTKVKYVTEGMRKPAFLSGEQ
KKAIVDLLFKTNRKVTVKQLKEDYFKKIECFDSVEISGVEDRFNASLGTYHDLLKIIKDKDFLDNEEN
EDILEDIVLTLTLFEDREMIEERLKTYAHLFDDKVMKQLKRRRYTGWGRLSRKLINGIRDKQSGKTIL
DFLKSDGFANRNFMQLIHDDSLTFKEDIQKAQVSGQGDSLHEHIANLAGSPAIKKGILQTVKVVDELV
KVMGRHKPENIVIEMARENQTTQKGQKNSRERMKRIEEGIKELGSQILKEHPVENTQLQNEKLYLYYL
QNGRDMYVDQELDINRLSDYDVDHIVPQSFLKDDSIDNKVLTRSDKNRGKSDNVPSEEVVKKMKNYWR
QLLNAKLITQRKFDNLTKAERGGLSELDKAGFIKRQLVETRQITKHVAQILDSRMNTKYDENDKLIRE
VKVITLKSKLVSDFRKDFQFYKVREINNYHHAHDAYLNAVVGTALIKKYPKLESEFVYGDYKVYDVRK
MIAKSEQEIGKATAKYFFYSNIMNFFKTEITLANGEIRKRPLIETNGETGEIVWDKGRDFATVRKVLS
MPQVNIVKKTEVQTGGFSKESILPKRNSDKLIARKKDWDPKKYGGFDSPTVAYSVLVVAKVEKGKSKK
LKSVKELLGITIMERSSFEKNPIDFLEAKGYKEVKKDLIIKLPKYSLFELENGRKRMLASAGELQKGN
ELALPSKYVNFLYLASHYEKLKGSPEDNEQKQLFVEQHKHYLDEIIEQISEFSKRVILADANLDKVLS
AYNKHRDKPIREQAENIIHLFTLTNLGAPAAFKYFDTTIDRKRYTSTKEVLDATLIHQSITGLYETRI
DLSQLGGDGSPKKKRKVSSDYKDHDGDYKDHDIDYKDDDDKAAG (wild type Cas9
encoded by SEQ ID NO: 3).

[0070] In some embodiments, wild type Cas9 corresponds to Cas9 from Streptococcus pyogenes (NCBI Reference Sequence: NC_002737.2, SEQ ID NO: 5 (nucleotide); and Uniport Reference Sequence: Q99ZW2, SEQ ID NO: 6 (amino acid).

(SEQ ID NO: 5)
ATGGATAAGAAATACTCAATAGGCTTAGATATCGGCACAAATAGCGTCGGATGGGCGGTGATCACTGA
TGAATATAAGGTTCCGTCTAAAAAGTTCAAGGTTCTGGGAAATACAGACCGCCACAGTATCAAAAAAA
ATCTTATAGGGGCTCTTTTATTTGACAGTGGAGAGACAGCGGAAGCGACTCGTCTCAAACGGACAGCT
CGTAGAAGGTATACACGTCGGAAGAATCGTATTTGTTATCTACAGGAGATTTTTTCAAATGAGATGGC
GAAAGTAGATGATAGTTTCTTTCATCGACTTGAAGAGTCTTTTTTGGTGGAAGAAGACAAGAAGCATG
AACGTCATCCTATTTTTGGAAATATAGTAGATGAAGTTGCTTATCATGAGAAATATCCAACTATCTAT
CATCTGCGAAAAAAATTGGTAGATTCTACTGATAAAGCGGATTTGCGCTTAATCTATTTGGCCTTAGC
GCATATGATTAAGTTTCGTGGTCATTTTTTGATTGAGGGAGATTTAAATCCTGATAATAGTGATGTGG
ACAAACTATTTATCCAGTTGGTACAAACCTACAATCAATTATTTGAAGAAAACCCTATTAACGCAAGT
GGAGTAGATGCTAAAGCGATTCTTTCTGCACGATTGAGTAAATCAAGACGATTAGAAAATCTCATTGC
TCAGCTCCCCGGTGAGAAGAAAAATGGCTTATTTGGGAATCTCATTGCTTTGTCATTGGGTTTGACCC
CTAATTTTAAATCAAATTTTGATTTGGCAGAAGATGCTAAATTACAGCTTTCAAAAGATACTTACGAT
GATGATTTAGATAATTTATTGGCGCAAATTGGAGATCAATATGCTGATTTGTTTTTGGCAGCTAAGAA
TTTATCAGATGCTATTTTACTTTCAGATATCCTAAGAGTAAATACTGAAATAACTAAGGCTCCCCTAT
CAGCTTCAATGATTAAACGCTACGATGAACATCATCAAGACTTGACTCTTTTAAAAGCTTTAGTTCGA
CAACAACTTCCAGAAAAGTATAAAGAAATCTTTTTTGATCAATCAAAAAACGGATATGCAGGTTATAT
TGATGGGGGAGCTAGCCAAGAAGAATTTTATAAATTTATCAAACCAATTTTAGAAAAAATGGATGGTA
CTGAGGAATTATTGGTGAAACTAAATCGTGAAGATTTGCTGCGCAAGCAACGGACCTTTGACAACGGC
TCTATTCCCCATCAAATTCACTTGGGTGAGCTGCATGCTATTTTGAGAAGACAAGAAGACTTTTATCC
ATTTTTAAAAGACAATCGTGAGAAGATTGAAAAAATCTTGACTTTTCGAATTCCTTATTATGTTGGTC
CATTGGCGCGTGGCAATAGTCGTTTTGCATGGATGACTCGGAAGTCTGAAGAAACAATTACCCCATGG
AATTTTGAAGAAGTTGTCGATAAAGGTGCTTCAGCTCAATCATTTATTGAACGCATGACAAACTTTGA
TAAAAATCTTCCAAATGAAAAAGTACTACCAAAACATAGTTTGCTTTATGAGTATTTTACGGTTTATA
ACGAATTGACAAAGGTCAAATATGTTACTGAAGGAATGCGAAAACCAGCATTTCTTTCAGGTGAACAG
AAGAAAGCCATTGTTGATTTACTCTTCAAAACAAATCGAAAAGTAACCGTTAAGCAATTAAAAGAAGA
TTATTTCAAAAAAATAGAATGTTTTGATAGTGTTGAAATTTCAGGAGTTGAAGATAGATTTAATGCTT
CATTAGGTACCTACCATGATTTGCTAAAAATTATTAAAGATAAAGATTTTTTGGATAATGAAGAAAAT
GAAGATATCTTAGAGGATATTGTTTTAACATTGACCTTATTTGAAGATAGGGAGATGATTGAGGAAAG
ACTTAAAACATATGCTCACCTCTTTGATGATAAGGTGATGAAACAGCTTAAACGTCGCCGTTATACTG
GTTGGGGACGTTTGTCTCGAAAATTGATTAATGGTATTAGGGATAAGCAATCTGGCAAAACAATATTA
GATTTTTTGAAATCAGATGGTTTTGCCAATCGCAATTTTATGCAGCTGATCCATGATGATAGTTTGAC
ATTTAAAGAAGACATTCAAAAAGCACAAGTGTCTGGACAAGGCGATAGTTTACATGAACATATTGCAA
ATTTAGCTGGTAGCCCTGCTATTAAAAAAGGTATTTTACAGACTGTAAAAGTTGTTGATGAATTGGTC
AAAGTAATGGGGCGGCATAAGCCAGAAAATATCGTTATTGAAATGGCACGTGAAAATCAGACAACTCA
AAAGGGCCAGAAAAATTCGCGAGAGCGTATGAAACGAATCGAAGAAGGTATCAAAGAATTAGGAAGTC
AGATTCTTAAAGAGCATCCTGTTGAAAATACTCAATTGCAAAATGAAAAGCTCTATCTCTATTATCTC
CAAAATGGAAGAGACATGTATGTGGACCAAGAATTAGATATTAATCGTTTAAGTGATTATGATGTCGA
TCACATTGTTCCACAAAGTTTCCTTAAAGACGATTCAATAGACAATAAGGTCTTAACGCGTTCTGATA
AAAATCGTGGTAAATCGGATAACGTTCCAAGTGAAGAAGTAGTCAAAAAGATGAAAAACTATTGGAGA
CAACTTCTAAACGCCAAGTTAATCACTCAACGTAAGTTTGATAATTTAACGAAAGCTGAACGTGGAGG
TTTGAGTGAACTTGATAAAGCTGGTTTTATCAAACGCCAATTGGTTGAAACTCGCCAAATCACTAAGC
ATGTGGCACAAATTTTGGATAGTCGCATGAATACTAAATACGATGAAAATGATAAACTTATTCGAGAG
GTTAAAGTGATTACCTTAAAATCTAAATTAGTTTCTGACTTCCGAAAAGATTTCCAATTCTATAAAGT
ACGTGAGATTAACAATTACCATCATGCCCATGATGCGTATCTAAATGCCGTCGTTGGAACTGCTTTGA
TTAAGAAATATCCAAAACTTGAATCGGAGTTTGTCTATGGTGATTATAAAGTTTATGATGTTCGTAAA
ATGATTGCTAAGTCTGAGCAAGAAATAGGCAAAGCAACCGCAAAATATTTCTTTTACTCTAATATCAT
GAACTTCTTCAAAACAGAAATTACACTTGCAAATGGAGAGATTCGCAAACGCCCTCTAATCGAAACTA
ATGGGGAAACTGGAGAAATTGTCTGGGATAAAGGGCGAGATTTTGCCACAGTGCGCAAAGTATTGTCC
ATGCCCCAAGTCAATATTGTCAAGAAAACAGAAGTACAGACAGGCGGATTCTCCAAGGAGTCAATTTT
ACCAAAAAGAAATTCGGACAAGCTTATTGCTCGTAAAAAAGACTGGGATCCAAAAAAATATGGTGGTT
TTGATAGTCCAACGGTAGCTTATTCAGTCCTAGTGGTTGCTAAGGTGGAAAAAGGGAAATCGAAGAAG
TTAAAATCCGTTAAAGAGTTACTAGGGATCACAATTATGGAAAGAAGTTCCTTTGAAAAAAATCCGAT
TGACTTTTTAGAAGCTAAAGGATATAAGGAAGTTAAAAAAGACTTAATCATTAAACTACCTAAATATA
GTCTTTTTGAGTTAGAAAACGGTCGTAAACGGATGCTGGCTAGTGCCGGAGAATTACAAAAAGGAAAT
GAGCTGGCTCTGCCAAGCAAATATGTGAATTTTTTATATTTAGCTAGTCATTATGAAAAGTTGAAGGG
TAGTCCAGAAGATAACGAACAAAAACAATTGTTTGTGGAGCAGCATAAGCATTATTTAGATGAGATTA
TTGAGCAAATCAGTGAATTTTCTAAGCGTGTTATTTTAGCAGATGCCAATTTAGATAAAGTTCTTAGT
GCATATAACAAACATAGAGACAAACCAATACGTGAACAAGCAGAAAATATTATTCATTTATTTACGTT
GACGAATCTTGGAGCTCCCGCTGCTTTTAAATATTTTGATACAACAATTGATCGTAAACGATATACGT
CTACAAAAGAAGTTTTAGATGCCACTCTTATCCATCAATCCATCACTGGTCTTTATGAAACACGCATT
GATTTGAGTCAGCTAGGAGGTGACTGA
(SEQ ID NO: 6)
MDKKYSIGLDIGTNSVGWAVITDEYKVPSKKFKVLGNTDRHSIKKNLIGALLFDSGETAEATRLKRTA
RRRYTRRKNRICYLQEIFSNEMAKVDDSFFHRLEESFLVEEDKKHERHPIFGNIVDEVAYHEKYPTIY
HLRKKLVDSTDKADLRLIYLALAHMIKFRGHFLIEGDLNPDNSDVDKLFIQLVQTYNQLFEENPINAS
GVDAKAILSARLSKSRRLENLIAQLPGEKKNGLFGNLIALSLGLTPNFKSNFDLAEDAKLQLSKDTYD
DDLDNLLAQIGDQYADLFLAAKNLSDAILLSDILRVNTEITKAPLSASMIKRYDEHHQDLTLLKALVR
QQLPEKYKEIFFDQSKNGYAGYIDGGASQEEFYKFIKPILEKMDGTEELLVKLNREDLLRKQRTFDNG
SIPHQIHLGELHAILRRQEDFYPFLKDNREKIEKILTFRIPYYVGPLARGNSRFAWMTRKSEETITPW
NFEEVVDKGASAQSFIERMTNFDKNLPNEKVLPKHSLLYEYFTVYNELTKVKYVTEGMRKPAFLSGEQ
KKAIVDLLFKTNRKVTVKQLKEDYFKKIECFDSVEISGVEDRFNASLGTYHDLLKIIKDKDFLDNEEN
EDILEDIVLTLTLFEDREMIEERLKTYAHLFDDKVMKQLKRRRYTGWGRLSRKLINGIRDKQSGKTIL
DFLKSDGFANRNFMQLIHDDSLTFKEDIQKAQVSGQGDSLHEHIANLAGSPAIKKGILQTVKVVDELV
KVMGRHKPENIVIEMARENQTTQKGQKNSRERMKRIEEGIKELGSQILKEHPVENTQLQNEKLYLYYL
QNGRDMYVDQELDINRLSDYDVDHIVPQSFLKDDSIDNKVLTRSDKNRGKSDNVPSEEVVKKMKNYWR
QLLNAKLITQRKFDNLTKAERGGLSELDKAGFIKRQLVETRQITKHVAQILDSRMNTKYDENDKLIRE
VKVITLKSKLVSDFRKDFQFYKVREINNYHHAHDAYLNAVVGTALIKKYPKLESEFVYGDYKVYDVRK
MIAKSEQEIGKATAKYFFYSNIMNFFKTEITLANGEIRKRPLIETNGETGEIVWDKGRDFATVRKVLS
MPQVNIVKKTEVQTGGFSKESILPKRNSDKLIARKKDWDPKKYGGFDSPTVAYSVLVVAKVEKGKSKK
LKSVKELLGITIMERSSFEKNPIDFLEAKGYKEVKKDLIIKLPKYSLFELENGRKRMLASAGELQKGN
ELALPSKYVNFLYLASHYEKLKGSPEDNEQKQLFVEQHKHYLDEIIEQISEFSKRVILADANLDKVLS
AYNKHRDKPIREQAENIIHLFTLTNLGAPAAFKYFDTTIDRKRYTSTKEVLDATLIHQSITGLYETRI
DLSQLGGD (single underline: HNH domain; double underline: RuvC domain)

[0071] In some embodiments, Cas9 refers to a Cas9 nickase having a D10A substitution (e.g., S. pyogenes Cas9 Q99ZW2 (D10A)) (SEQ ID NO: 7):

(SEQ ID NO: 7)
MDKKYSIGLAIGTNSVGWAVITDEYKVPSKKFKVLGNTDRHSIKKNLIGALLFDSGETAEATRLKRTA
RRRYTRRKNRICYLQEIFSNEMAKVDDSFFHRLEESFLVEEDKKHERHPIFGNIVDEVAYHEKYPTIY
HLRKKLVDSTDKADLRLIYLALAHMIKFRGHFLIEGDLNPDNSDVDKLFIQLVQTYNQLFEENPINAS
GVDAKAILSARLSKSRRLENLIAQLPGEKKNGLFGNLIALSLGLTPNFKSNFDLAEDAKLQLSKDTYD
DDLDNLLAQIGDQYADLFLAAKNLSDAILLSDILRVNTEITKAPLSASMIKRYDEHHQDLTLLKALVR
QQLPEKYKEIFFDQSKNGYAGYIDGGASQEEFYKFIKPILEKMDGTEELLVKLNREDLLRKQRTFDNG
SIPHQIHLGELHAILRRQEDFYPFLKDNREKIEKILTFRIPYYVGPLARGNSRFAWMTRKSEETITPW
NFEEVVDKGASAQSFIERMTNFDKNLPNEKVLPKHSLLYEYFTVYNELTKVKYVTEGMRKPAFLSGEQ
KKAIVDLLFKTNRKVTVKQLKEDYFKKIECFDSVEISGVEDRFNASLGTYHDLLKIIKDKDFLDNEEN
EDILEDIVLTLTLFEDREMIEERLKTYAHLFDDKVMKQLKRRRYTGWGRLSRKLINGIRDKQSGKTIL
DFLKSDGFANRNFMQLIHDDSLTFKEDIQKAQVSGQGDSLHEHIANLAGSPAIKKGILQTVKVVDELV
KVMGRHKPENIVIEMARENQTTQKGQKNSRERMKRIEEGIKELGSQILKEHPVENTQLQNEKLYLYYL
QNGRDMYVDQELDINRLSDYDVDHIVPQSFLKDDSIDNKVLTRSDKNRGKSDNVPSEEVVKKMKNYWR
QLLNAKLITQRKFDNLTKAERGGLSELDKAGFIKRQLVETRQITKHVAQILDSRMNTKYDENDKLIRE
VKVITLKSKLVSDFRKDFQFYKVREINNYHHAHDAYLNAVVGTALIKKYPKLESEFVYGDYKVYDVRK
MIAKSEQEIGKATAKYFFYSNIMNFFKTEITLANGEIRKRPLIETNGETGEIVWDKGRDFATVRKVLS
MPQVNIVKKTEVQTGGFSKESILPKRNSDKLIARKKDWDPKKYGGFDSPTVAYSVLVVAKVEKGKSKK
LKSVKELLGITIMERSSFEKNPIDFLEAKGYKEVKKDLIIKLPKYSLFELENGRKRMLASAGELQKGN
ELALPSKYVNFLYLASHYEKLKGSPEDNEQKQLFVEQHKHYLDEIIEQISEFSKRVILADANLDKVLS
AYNKHRDKPIREQAENIIHLFTLTNLGAPAAFKYFDTTIDRKRYTSTKEVLDATLIHQSITGLYETRI
DLSQLGGD (comprises D10A substitution).
(single underline: HNH domain; double underline: RuvC domain)

[0072] In other embodiments, Cas9 refers to a Cas9 nickase having a H840A substitution (e.g., S. pyogenes Cas9 Q99ZW2 (H840A)) (SEQ ID NO: 8):

(SEQ ID NO: 8)
MDKKYSIGLDIGTNSVGWAVITDEYKVPSKKFKVLGNTDRHSIKKNLIGALLFDSGETAEATRLKRTA
RRRYTRRKNRICYLQEIFSNEMAKVDDSFFHRLEESFLVEEDKKHERHPIFGNIVDEVAYHEKYPTIY
HLRKKLVDSTDKADLRLIYLALAHMIKFRGHFLIEGDLNPDNSDVDKLFIQLVQTYNQLFEENPINAS
GVDAKAILSARLSKSRRLENLIAQLPGEKKNGLFGNLIALSLGLTPNFKSNFDLAEDAKLQLSKDTYD
DDLDNLLAQIGDQYADLFLAAKNLSDAILLSDILRVNTEITKAPLSASMIKRYDEHHQDLTLLKALVR
QQLPEKYKEIFFDQSKNGYAGYIDGGASQEEFYKFIKPILEKMDGTEELLVKLNREDLLRKQRTFDNG
SIPHQIHLGELHAILRRQEDFYPFLKDNREKIEKILTFRIPYYVGPLARGNSRFAWMTRKSEETITPW
NFEEVVDKGASAQSFIERMTNFDKNLPNEKVLPKHSLLYEYFTVYNELTKVKYVTEGMRKPAFLSGEQ
KKAIVDLLFKTNRKVTVKQLKEDYFKKIECFDSVEISGVEDRFNASLGTYHDLLKIIKDKDFLDNEEN
EDILEDIVLTLTLFEDREMIEERLKTYAHLFDDKVMKQLKRRRYTGWGRLSRKLINGIRDKQSGKTIL
DFLKSDGFANRNFMQLIHDDSLTFKEDIQKAQVSGQGDSLHEHIANLAGSPAIKKGILQTVKVVDELV
KVMGRHKPENIVIEMARENQTTQKGQKNSRERMKRIEEGIKELGSQILKEHPVENTQLQNEKLYLYYL
QNGRDMYVDQELDINRLSDYDVDAIVPQSFLKDDSIDNKVLTRSDKNRGKSDNVPSEEVVKKMKNYWR
QLLNAKLITQRKFDNLTKAERGGLSELDKAGFIKRQLVETRQITKHVAQILDSRMNTKYDENDKLIRE
VKVITLKSKLVSDFRKDFQFYKVREINNYHHAHDAYLNAVVGTALIKKYPKLESEFVYGDYKVYDVRK
MIAKSEQEIGKATAKYFFYSNIMNFFKTEITLANGEIRKRPLIETNGETGEIVWDKGRDFATVRKVLS
MPQVNIVKKTEVQTGGFSKESILPKRNSDKLIARKKDWDPKKYGGFDSPTVAYSVLVVAKVEKGKSKK
LKSVKELLGITIMERSSFEKNPIDFLEAKGYKEVKKDLIIKLPKYSLFELENGRKRMLASAGELQKGN
ELALPSKYVNFLYLASHYEKLKGSPEDNEQKQLFVEQHKHYLDEIIEQISEFSKRVILADANLDKVLS
AYNKHRDKPIREQAENIIHLFTLTNLGAPAAFKYFDTTIDRKRYTSTKEVLDATLIHQSITGLYETRI
DLSQLGGD (single underline: HNH domain; double underline: RuvC domain;
H840A mutation shown in bold)

[0073] In still other embodiments, Cas9 refers to a dead Cas9 having D10A and H840A substitutions (e.g., S. pyogenes Cas9 Q99ZW2 (D10A) (H840A)) (SEQ ID NO: 9):

(SEQ ID NO: 9)
MDKKYSIGLAIGTNSVGWAVITDEYKVPSKKFKVLGNTDRHSIKKNLIG
ALLFDSGETAEATRLKRTARRRYTRRKNRICYLQEIFSNEMAKVDDSFF
HRLEESFLVEEDKKHERHPIFGNIVDEVAYHEKYPTIYHLRKKLVDSTD
KADLRLIYLALAHMIKFRGHFLIEGDLNPDNSDVDKLFIQLVQTYNQLF
EENPINASGVDAKAILSARLSKSRRLENLIAQLPGEKKNGLFGNLIALS
LGLTPNFKSNFDLAEDAKLQLSKDTYDDDLDNLLAQIGDQYADLFLAAK
NLSDAILLSDILRVNTEITKAPLSASMIKRYDEHHQDLTLLKALVRQQL
PEKYKEIFFDQSKNGYAGYIDGGASQEEFYKFIKPILEKMDGTEELLVK
LNREDLLRKQRTFDNGSIPHQIHLGELHAILRRQEDFYPFLKDNREKIE
KILTFRIPYYVGPLARGNSRFAWMTRKSEETITPWNFEEVVDKGASAQS
FIERMTNFDKNLPNEKVLPKHSLLYEYFTVYNELTKVKYVTEGMRKPAF
LSGEQKKAIVDLLFKTNRKVTVKQLKEDYFKKIECFDSVEISGVEDRFN
ASLGTYHDLLKIIKDKDFLDNEENEDILEDIVLTLTLFEDREMIEERLK
TYAHLFDDKVMKQLKRRRYTGWGRLSRKLINGIRDKQSGKTILDFLKSD
GFANRNFMQLIHDDSLTFKEDIQKAQVSGQGDSLHEHIANLAGSPAIKK
GILQTVKVVDELVKVMGRHKPENIVIEMARENQTTQKGQKNSRERMKRI
EEGIKELGSQILKEHPVENTQLQNEKLYLYYLQNGRDMYVDQELDINRL
SDYDVDAIVPQSFLKDDSIDNKVLTRSDKNRGKSDNVPSEEVVKKMKNY
WRQLLNAKLITQRKFDNLTKAERGGLSELDKAGFIKRQLVETRQITKHV
AQILDSRMNTKYDENDKLIREVKVITLKSKLVSDFRKDFQFYKVREINN
YHHAHDAYLNAVVGTALIKKYPKLESEFVYGDYKVYDVRKMIAKSEQEI
GKATAKYFFYSNIMNFFKTEITLANGEIRKRPLIETNGETGEIVWDKGR
DFATVRKVLSMPQVNIVKKTEVQTGGFSKESILPKRNSDKLIARKKDWD
PKKYGGFDSPTVAYSVLVVAKVEKGKSKKLKSVKELLGITIMERSSFEK
NPIDFLEAKGYKEVKKDLIIKLPKYSLFELENGRKRMLASAGELQKGNE
LALPSKYVNFLYLASHYEKLKGSPEDNEQKQLFVEQHKHYLDEIIEQIS
EFSKRVILADANLDKVLSAYNKHRDKPIREQAENIIHLFTLTNLGAPAA
FKYFDTTIDRKRYTSTKEVLDATLIHQSITGLYETRIDLSQLGGD

(D10A and H840A mutations shown in bold; see, e.g., Qi et al., Repurposing CRISPR as an RNA-guided platform for sequence-specific control of gene expression. Cell. 2013; 152(5):1173-83, the entire contents of which are incorporated herein by reference).

[0074] In some embodiments, Cas9 refers to Cas9 protein derived from: Corynebacterium ulcerans (NCBI Refs: NC_015683.1, NC_017317.1); Corynebacterium diphtheria (NCBI Refs: NC_016782.1, NC_016786.1); Spiroplasma syrphidicola (NCBI Ref: NC_021284.1); Prevotella intermedia (NCBI Ref: NC_017861.1); Spiroplasma taiwanense (NCBI Ref: NC_021846.1); Streptococcus iniae (NCBI Ref: NC_021314.1); Belliella baltica (NCBI Ref: NC_018010.1); Psychroflexus torquis I (NCBI Ref: NC_018721.1); Streptococcus thermophilus (NCBI Ref: YP_820832.1), Listeria innocua (NCBI Ref: NP_472073.1), Campylobacter jejuni (NCBI Ref: YP_002344900.1); Geobacillus stearothermophilus (NCBI Ref: NZ_CP008934.1); or Neisseria meningitidis (NCBI Ref: YP_002342100.1) or to a Cas9 from any other organism.

[0075] In some embodiments, a Cas9 domain comprising one or more mutations provided herein is at least about 70% identical, at least about 80% identical, at least about 90% identical, at least about 92%, at least about 95% identical, at least about 98% identical, at least about 99% identical, at least about 99.5% identical, or at least about 99.9% identical to SEQ ID NO: 2. In some embodiments, variants of a Cas9 domain comprising one or more mutations provided herein are provided having amino acid sequences which are shorter, or longer than SEQ ID NO: 2, by about 5 amino acids, by about 10 amino acids, by about 15 amino acids, by about 20 amino acids, by about 25 amino acids, by about 30 amino acids, by about 40 amino acids, by about 50 amino acids, by about 75 amino acids, by about 100 amino acids, or more.

[0076] In some embodiments, the Cas9 domain comprises a D10A mutation, while the residue at position 840 remains a histidine relative to the amino acid sequence as provided in SEQ ID NO: 2, or at corresponding positions in any of the amino acid sequences provided in SEQ ID NO: 2. Without wishing to be bound by any particular theory, the presence of the catalytic residue H840 restores the activity of the Cas9 to cleave the non-edited (e.g., non-deaminated) strand containing a G opposite the targeted C. Restoration of H840 (e.g., from A840) does not result in the cleavage of the target strand containing the C. Such Cas9 variants are able to generate a single-strand DNA break (nick) at a specific location based on the gRNA-defined target sequence, leading to repair of the non-edited strand, ultimately resulting in a base change (e.g., a G to A change) on the non-edited strand. Briefly, the C of a C-G base pair can be deaminated to a U by a deaminase, e.g., an APOBEC deaminase. Nicking the non-edited strand, the strand having the G, facilitates removal of the G via mismatch repair mechanisms. Uracil-DNA glycosylase inhibitor protein (UGI) inhibits Uracil-DNA glycosylase (UDG), which prevents removal of the U.

[0077] In other embodiments, dCas9 variants having mutations other than D10A and H840A are provided, which, e.g., result in nuclease inactivated Cas9 (dCas9). Such mutations, by way of example, include other amino acid substitutions at D10 and H820, or other substitutions within the nuclease domains of Cas9 (e.g., substitutions in the HNH nuclease subdomain and/or the RuvC1 subdomain).

[0078] The term “Cas9 nickase” or “Cas9n” or “nCas9” as used herein, refers to a Cas9 domain that is capable of cleaving one strand of the duplexed nucleic acid molecule (e.g., a duplexed DNA molecule). In some embodiments, a Cas9 nickase comprises a D10A mutation and has a histidine at position H840 of SEQ ID NO: 2, or a corresponding mutation in any of SEQ ID NOs: 2. For example, in some embodiments, a Cas9 nickase comprises the amino acid sequence as set forth in SEQ ID NO: 8 comprising the H840A substitution. Such a Cas9 nickase (Cas9n) has an active HNH nuclease domain and is able to cleave the non-targeted strand of DNA, i.e., the strand bound by the gRNA. Further, such a Cas9 nickase has an inactive RuvC nuclease domain and is not able to cleave the targeted strand of the DNA, i.e., the strand where base editing is desired. In some embodiments, any of the Cas9 domains provided herein comprises a D10A mutation (e.g., SEQ ID NO: 7). In some embodiments, any of the Cas9 domains provided herein comprises a H840A mutation (SEQ ID NO: 8). Exemplary Cas9 nickases are shown below. However, it should be appreciated that additional Cas9 nickases that generate a single-stranded DNA break of a DNA duplex would be apparent to the skilled artisan and are within the scope of this disclosure.

[0079] In some embodiments, Cas9 fusion proteins as provided herein comprise the full-length amino acid sequence of a Cas9 domain, e.g., one of the sequences provided above. In other embodiments, however, fusion proteins as provided herein do not comprise a full-length Cas9 sequence, but only a fragment thereof. For example, in some embodiments, a Cas9 fusion protein provided herein comprises a Cas9 fragment, wherein the fragment binds crRNA and tracrRNA or a sgRNA, but does not comprise a functional nuclease domain, e.g., it comprises only a truncated version of a nuclease domain or no nuclease domain at all. Exemplary amino acid sequences of suitable Cas9 domains and Cas9 fragments are provided herein, and additional suitable sequences of Cas9 domains and Cas9 fragments will be apparent to those of skill in the art. In some embodiments, a Cas9 fragment is at least 30%, at least 35%, at least 40%, at least 45%, at least 50%, at least 55%, at least 60%, at least 65%, at least 70%, at least 75%, at least 80%, at least 85%, at least 90%, at least 95% identical, at least 96%, at least 97%, at least 98%, at least 99%, or at least 99.5% of the amino acid length of a corresponding wild type Cas9 domain. In some embodiments, a Cas9 fragment comprises at least at least 100 amino acids in length. In some embodiments, the Cas9 fragment is at least 100, 150, 200, 250, 300, 350, 400, 450, 500, 550, 600, 650, 700, 750, 800, 850, 900, 950, 1000, 1050, 1100, 1150, 1200, 1250, 1300, 1350, 1400, 1450, 1500, 1550, or at least 1600 amino acids of a corresponding wild type Cas9 domain. In some embodiments, the Cas9 fragment comprises an amino acid sequence that has at least 10, at least 15, at least 20, at least 30, at least 40, at least 50, at least 60, at least 70, at least 80, at least 90, at least 100, at least 150, at least 200, at least 250, at least 300, at least 350, at least 400, at least 500, at least 600, at least 700, at least 800, at least 900, at least 1000, at least 1100, or at least 1200 identical contiguous amino acid residues of a corresponding wild type Cas9 domain. In some embodiments, the wild-type protein is S. pyogenes Cas9 (SpCas9) of SEQ ID NO: 2.

[0080] In some embodiments, Cas9 fusion proteins as provided herein comprise the full-length amino acid sequence of a Cas9 domain, e.g., one of the Cas9 sequences provided herein. In other embodiments, however, fusion proteins as provided herein do not comprise a full-length Cas9 sequence, but only a fragment thereof. For example, in some embodiments, a Cas9 fusion protein provided herein comprises a Cas9 fragment, wherein the fragment binds crRNA and tracrRNA or sgRNA, but does not comprise a functional nuclease domain, e.g., in that it comprises only a truncated version of a nuclease domain or no nuclease domain at all. Exemplary amino acid sequences of suitable Cas9 domains and Cas9 fragments are provided herein, and additional suitable sequences of Cas9 domains and fragments will be apparent to those of ordinary skill in the art. In some embodiments, Cas9 refers to Cas9 from: Corynebacterium ulcerans (NCBI Refs: NC_015683.1, NC_017317.1); Corynebacterium diphtheria (NCBI Refs: NC_016782.1, NC_016786.1); Spiroplasma syrphidicola (NCBI Ref: NC_021284.1); Prevotella intermedia (NCBI Ref: NC_017861.1); Spiroplasma taiwanense (NCBI Ref: NC_021846.1); Streptococcus iniae (NCBI Ref: NC_021314.1); Belliella baltica (NCBI Ref: NC_018010.1); Psychroflexus torquis I (NCBI Ref: NC_018721.1); Streptococcus thermophilus (NCBI Ref: YP_820832.1); Geobacillus stearothermophilus (NCBI Ref: NZ_CP008934.1); Listeria innocua (NCBI Ref: NP_472073.1); Campylobacter jejuni (NCBI Ref: YP_002344900.1); or Neisseria. meningitidis (NCBI Ref: YP_002342100.1).

[0081] The term “deaminase” or “deaminase domain,” as used herein, refers to a protein or enzyme that catalyzes a deamination reaction. In some embodiments, the deaminase or deaminase domain is a naturally-occurring deaminase from an organism, such as a human, chimpanzee, gorilla, monkey, cow, dog, rat, or mouse. In some embodiments, the deaminase or deaminase domain is a variant of a naturally-occurring deaminase from an organism, that does not occur in nature. For example, in some embodiments, the deaminase or deaminase domain is at least 50%, at least 55%, at least 60%, at least 65%, at least 70%, at least 75% at least 80%, at least 85%, at least 90%, at least 95%, at least 96%, at least 97%, at least 98%, at least 99%, or at least 99.5% identical to a naturally-occurring deaminase from an organism.

[0082] In some embodiments, the deaminase or deaminase domain is a cytidine deaminase, catalyzing the hydrolytic deamination of cytidine or deoxycytidine to uridine or deoxyuridine, respectively. In some embodiments, the deaminase or deaminase domain is a cytidine deaminase domain, catalyzing the hydrolytic deamination of cytosine to uracil. In some embodiments, the cytidine deaminase catalyzes the hydrolytic deamination of cytidine or cytosine in deoxyribonucleic acid (DNA). In some embodiments, the cytidine deaminase domain comprises the amino acid sequence of any one disclosed herein. In some embodiments, the cytidine deaminase or cytidine deaminase domain is a naturally-occurring cytidine deaminase from an organism, such as a human, chimpanzee, gorilla, monkey, cow, dog, rat, or mouse. In some embodiments, the cytidine deaminase or cytidine deaminase domain is a variant of a naturally-occurring cytidine deaminase from an organism that does not occur in nature. For example, in some embodiments, the cytidine deaminase or cytidine deaminase domain is at least 50%, at least 55%, at least 60%, at least 65%, at least 70%, at least 75% at least 80%, at least 85%, at least 90%, at least 95%, at least 96%, at least 97%, at least 98%, at least 99%, or at least 99.5% identical to a naturally-occurring cytidine deaminase from an organism, such as a human, chimpanzee, gorilla, monkey, cow, dog, rat, or mouse.

[0083] In some embodiments, the deaminase or deaminase domain is an adenosine deaminase, which catalyzes the hydrolytic deamination of adenine or adenosine. In some embodiments, the deaminase or deaminase domain is an adenosine deaminase, catalyzing the hydrolytic deamination of adenosine or deoxyadenosine to inosine or deoxyinosine, respectively. In some embodiments, the adenosine deaminase catalyzes the hydrolytic deamination of adenine or adenosine in deoxyribonucleic acid (DNA). The adenosine deaminases (e.g., engineered adenosine deaminases, evolved adenosine deaminases) provided herein may be from any organism, such as a bacterium. In some embodiments, the deaminase or deaminase domain is a variant of a naturally-occurring deaminase from an organism. In some embodiments, the deaminase or deaminase domain does not occur in nature. For example, in some embodiments, the deaminase or deaminase domain is at least 50%, at least 55%, at least 60%, at least 65%, at least 70%, at least 75% at least 80%, at least 85%, at least 90%, at least 95%, at least 96%, at least 97%, at least 98%, at least 99%, or at least 99.5% identical to a naturally-occurring deaminase. In some embodiments, the adenosine deaminase is from a bacterium, such as E. coli, S. aureus, S. typhi, S. putrefaciens, H. influenzae, or C. crescentus. In some embodiments, the adenosine deaminase is a TadA deaminase. In some embodiments, the TadA deaminase is an E. coli TadA deaminase (ecTadA). In some embodiments, the TadA deaminase is a truncated E. coli TadA deaminase. For example, the truncated ecTadA may be missing one or more N-terminal amino acids relative to a full-length ecTadA. In some embodiments, the truncated ecTadA may be missing 1, 2, 3, 4, 5, 6, 7, 8, 9, 10, 11, 12, 13, 14, 15, 6, 17, 18, 19, or 20 N-terminal amino acid residues relative to the full length ecTadA. In some embodiments, the truncated ecTadA may be missing 1, 2, 3, 4, 5, 6, 7, 8, 9, 10, 11, 12, 13, 14, 15, 6, 17, 18, 19, or 20 C-terminal amino acid residues relative to the full length ecTadA. In some embodiments, the ecTadA deaminase does not comprise an N-terminal methionine.

[0084] In some embodiments, the TadA deaminase is an N-terminal truncated TadA. In certain embodiments, the adenosine deaminase comprises the amino acid sequence:

(SEQ ID NO: 77)
MSEVEFSHEYWMRHALTLAKRAWDEREVPVGAVLVHNNRVIGEGWNRPI
GRHDPTAHAEIMALRQGGLVMQNYRLIDATLYVTLEPCVMCAGAMIHSR
IGRVVFGARDAKTGAAGSLMDVLHHPGMNHRVEITEGILADECAALLSD
FFRMRRQEIKAQKKAQSSTD.

[0085] In some embodiments the TadA deaminase is a full-length E. coli TadA deaminase. For example, in certain embodiments, the adenosine deaminase comprises the amino acid sequence:

(SEQ ID NO: 78)
MRRAFITGVFFLSEVEFSHEYWMRHALTLAKRAWDEREVPVGAVLVHNN
RVIGEGWNRPIGRHDPTAHAEIMALRQGGLVMQNYRLIDATLYVTLEPC
VMCAGAMIHSRIGRVVFGARDAKTGAAGSLMDVLHHPGMNHRVEITEGI
LADECAALLSDFFRMRRQEIKAQKKAQSSTD

[0086] It should be appreciated, however, that additional adenosine deaminases useful in the present application would be apparent to the skilled artisan and are within the scope of this disclosure. For example, the adenosine deaminase may be a homolog of an ADAT. Exemplary ADAT homologs include, without limitation:

Staphylococcus aureus TadA:
(SEQ ID NO: 79)
MGSHMTNDIYFMTLAIEEAKKAAQLGEVPIGAIITKDDEVIARAHNLRE
TLQQPTAHAEHIAIERAAKVLGSWRLEGCTLYVTLEPCVMCAGTIVMSR
IPRVVYGADDPKGGCSGSLMNLLQQSNFNHRAIVDKGVLKEACSTLLTT
FFKNLRANKKSTN
Bacillus subtilis TadA:
(SEQ ID NO: 63)
MTQDELYMKEAIKEAKKAEEKGEVPIGAVLVINGEIIARAHNLRETEQR
SIAHAEMLVIDEACKALGTWRLEGATLYVTLEPCPMCAGAVVLSRVEKV
VFGAFDPKGGCSGTLMNLLQEERFNHQAEVVSGVLEEECGGMLSAFFRE
LRKKKKAARKNLSE
Salmonella typhimurium (S. typhimurium) TadA:
(SEQ ID NO: 80)
MPPAFITGVTSLSDVELDHEYWMRHALTLAKRAWDEREVPVGAVLVHNH
RVIGEGWNRPIGRHDPTAHAEIMALRQGGLVLQNYRLLDTTLYVTLEPC
VMCAGAMVHSRIGRVVFGARDAKTGAAGSLIDVLHHPGMNHRVEIIEGV
LRDECATLLSDFFRMRRQEIKALKKADRAEGAGPAV
Shewanella putrefaciens (S. putrefaciens) TadA:
(SEQ ID NO: 81)
MDEYWMQVAMQMAEKAEAAGEVPVGAVLVKDGQQIATGYNLSISQHDPT
AHAEILCLRSAGKKLENYRLLDATLYITLEPCAMCAGAMVHSRIARVVY
GARDEKTGAAGTVVNLLQHPAFNHQVEVTSGVLAEACSAQLSRFFKRRR
DEKKALKLAQRAQQGIE
Haemophilus influenzae F3031 (H. influenzae)
TadA:
(SEQ ID NO: 82)
MDAAKVRSEFDEKMMRYALELADKAEALGEIPVGAVLVDDARNIIGEGW
NLSIVQSDPTAHAEIIALRNGAKNIQNYRLLNSTLYVTLEPCTMCAGAI
LHSRIKRLVFGASDYKTGAIGSRFHFFDDYKMNHTLEITSGVLAEECSQ
KLSTFFQKRREEKKIEKALLKSLSDK
Caulobacter crescentus (C. crescentus) TadA:
(SEQ ID NO: 83)
MRTDESEDQDHRMMRLALDAARAAAEAGETPVGAVILDPSTGEVIATAG
NGPIAAHDPTAHAEIAAMRAAAAKLGNYRLTDLTLVVTLEPCAMCAGAI
SHARIGRVVFGADDPKGGAVVHGPKFFAQPTCHWRPEVTGGVLADESAD
LLRGFFRARRKAKI
Geobacter sulfurreducens (G. sulfurreducens)
TadA:
(SEQ ID NO: 84)
MSSLKKTPIRDDAYWMGKAIREAAKAAARDEVPIGAVIVRDGAVIGRGH
NLREGSNDPSAHAEMIAIRQAARRSANWRLTGATLYVTLEPCLMCMGAI
ILARLERVVFGCYDPKGGAAGSLYDLSADPRLNHQVRLSPGVCQEECGT
MLSDFFRDLRRRKKAKATPALFIDERKVPPEP

[0087] The term “effective amount,” as used herein, refers to an amount of a biologically active agent that is sufficient to elicit a desired biological response. For example, in some embodiments, an effective amount of a nuclease may refer to the amount of the nuclease that is sufficient to induce cleavage of a target site specifically bound and cleaved by the nuclease. In some embodiments, an effective amount of a fusion protein provided herein, e.g., of a fusion protein comprising a Cas9 domain and a nucleic acid editing domain (e.g., a deaminase domain) may refer to the amount of the fusion protein that is sufficient to induce editing of a target site specifically bound and edited by the fusion protein. As will be appreciated by the skilled artisan, the effective amount of an agent, e.g., a fusion protein, a nuclease, a deaminase, a recombinase, a hybrid protein, a protein dimer, a complex of a protein (or protein dimer) and a polynucleotide, or a polynucleotide, may vary depending on various factors such as, for example, on the desired biological response, e.g., on the specific allele, genome, or target site to be edited; on the cell or tissue being targeted; and on the agent (e.g., Cas9 domain, fusion protein, vector, cell, etc.) being used.

[0088] The term “immediately adjacent” as used in the context of two nucleic acid sequences refers to two sequences that directly abut each other as part of the same nucleic acid molecule and are not separated by one or more nucleotides. Accordingly, sequences are immediately adjacent, when the nucleotide at the 3′-end of one of the sequences is directly connected to nucleotide at the 5′-end of the other sequence via a phosphodiester bond.

[0089] The term “linker,” as used herein, refers to a chemical group or a molecule linking two molecules or moieties, e.g., two domains of a fusion protein, such as, for example, a nuclease-inactive Cas9 domain and a nucleic acid editing domain (e.g., a deaminase domain). A linker may be, for example, an amino acid sequence, a peptide, or a polymer of any length and composition. In some embodiments, a linker joins a gRNA binding domain of an RNA-programmable nuclease, including a Cas9 nuclease domain, and the catalytic domain of a nucleic-acid editing protein. In some embodiments, a linker joins a dCas9 and a nucleic-acid editing protein. In some embodiments, a linker joins a Cas9n and a nucleic-acid editing protein. In some embodiments, a linker joins an RNA-programmable nuclease domain and a UGI domain. In some embodiments, a linker joins a dCas9 and a UGI domain. In some embodiments, a linker joins a Cas9n and a UGI domain. Typically, the linker is positioned between, or flanked by, two groups, molecules, or other moieties and connected to each one via a covalent bond, thus connecting the two. In some embodiments, the linker is an amino acid or a plurality of amino acids (e.g., a peptide or protein). In some embodiments, the linker is an organic molecule, group, polymer, or chemical moiety. In some embodiments, the linker is 1-100 amino acids in length, for example, 1, 2, 3, 4, 5, 6, 7, 8, 9, 10, 11, 12, 13, 14, 15, 16, 17, 18, 19, 20, 21, 22, 23, 24, 25, 26, 27, 28, 29, 30, 30-35, 35-40, 40-45, 45-50, 50-60, 60-70, 70-80, 80-90, 90-100, 100-150, or 150-200 amino acids in length. Longer or shorter linkers are also contemplated. In some embodiments, a linker comprises the amino acid sequence SGSETPGTSESATPES (SEQ ID NO: 89), which may also be referred to as the XTEN linker. In some embodiments, a linker comprises the amino acid sequence SGGS (SEQ ID NO: 90). In some embodiments, a linker comprises the amino acid sequence (SGGS)2-SGSETPGTSESATPES-(SGGS)2 (SEQ ID NO: 96), which may also be referred to as (SGGS)2-XTEN-(SGGS)2. In some embodiments, a linker comprises (SGGS)n (SEQ ID NO: 92), (GGGS)n (SEQ ID NO: 94), (GGGGS)n (SEQ ID NO: 96), (G)n (SEQ ID NO: 97), (EAAAK)n (SEQ ID NO: 99), (GGS)n (SEQ ID NO: 101), SGGS (GGS)n (SEQ ID NO: 103), (SGGS)n-SGSETPGTSESATPES-(SGGS)n (SEQ ID NO: 98), or (XP)ₙ motif, or a combination of any of these, wherein n is independently an integer between 1 and 30, and wherein X is any amino acid. In some embodiments, n is 1, 2, 3, 4, 5, 6, 7, 8, 9, 10, 11, 12, 13, 14, or 15. In some embodiments, n is 1, 3, or 7. In some embodiments, the linker comprises the amino acid sequence:

(SEQ ID NO: 110)
GGSGGSPGSPAGSPTSTEEGTSESATPESGPGTSTEPSEGSAPGSPAGS
PTSTEEGTSTEPSEGSAPGTSTEPSEGSAPGTSESATPESGPGSEPATS
GGSGGS;
(SEQ ID NO: 111)
SGGSSGGSSGSETPGTSESATPES;
(SEQ ID NO: 109)
SGGSSGGSSGSETPGTSESATPESSGGSSGGSSGGSSGGS;
(SEQ ID NO: 107)
SGGSSGGSSGSETPGTSESATPESSGGSSGGSSGGSSGGSSGSETPGTS
ESATPESSGGSSGGS;
or
(SEQ ID NO: 108)
PGSPAGSPTSTEEGTSESATPESGPGTSTEPSEGSAPGSPAGSPTSTEE
GTSTEPSEGSAPGTSTEPSEGSAPGTSESATPESGPGSEPATS.

[0090] The term “mutation,” as used herein, refers to a substitution of a residue within a sequence, e.g., a nucleic acid or amino acid sequence, with another residue, or a deletion or insertion of one or more residues within a sequence. Mutations are typically described herein by identifying the original residue followed by the position of the residue within the sequence and by the identity of the newly substituted residue. Various methods for making the amino acid substitutions (mutations) provided herein are well known in the art, and are provided by, for example, Green and Sambrook, Molecular Cloning: A Laboratory Manual (4^{th} ed., Cold Spring Harbor Laboratory Press, Cold Spring Harbor, N.Y. (2012)).

[0091] The terms “nucleic acid” and “nucleic acid molecule,” as used herein, refer to a compound comprising a nucleobase and an acidic moiety, e.g., a nucleoside, a nucleotide, or a polymer of nucleotides. Typically, polymeric nucleic acids, e.g., nucleic acid molecules comprising three or more nucleotides are linear molecules, in which adjacent nucleotides are linked to each other via a phosphodiester linkage. In some embodiments, “nucleic acid” refers to individual nucleic acid residues (e.g. nucleotides and/or nucleosides). In some embodiments, “nucleic acid” refers to an oligonucleotide chain comprising three or more individual nucleotide residues. As used herein, the terms “oligonucleotide” and “polynucleotide” can be used interchangeably to refer to a polymer of nucleotides (e.g., a string of at least three nucleotides). In some embodiments, “nucleic acid” encompasses RNA as well as single and/or double-stranded DNA. Nucleic acids may be naturally occurring, for example, in the context of a genome, a transcript, mRNA, tRNA, rRNA, siRNA, snRNA, a plasmid, cosmid, chromosome, chromatid, or other naturally occurring nucleic acid molecule. On the other hand, a nucleic acid molecule may be a non-naturally occurring molecule, e.g., a DNA or RNA, an artificial chromosome, an engineered genome, or fragment thereof, or a synthetic DNA, RNA, DNA/RNA hybrid, or including non-naturally occurring nucleotides or nucleosides. Furthermore, the terms “nucleic acid,” “DNA,” “RNA,” and/or similar terms include nucleic acid analogs, e.g., analogs having other than a phosphodiester backbone. Nucleic acids can be purified from natural sources, produced using expression systems and optionally purified, chemically synthesized, etc. Where appropriate, e.g., in the case of chemically synthesized molecules, nucleic acids can comprise nucleoside analogs such as analogs having chemically modified bases or sugars, and backbone modifications. A nucleic acid sequence is presented in the 5′ to 3′ direction unless otherwise indicated. In some embodiments, a nucleic acid is or comprises natural nucleosides (e.g. adenosine, thymidine, guanosine, cytidine, uridine, deoxyadenosine, deoxythymidine, deoxyguanosine, and deoxycytidine); nucleoside analogs (e.g., 2-aminoadenosine, 2-thiothymidine, inosine, pyrrolo-pyrimidine, 3-methyl adenosine, 5-methylcytidine, 2-aminoadenosine, C5-bromouridine, C5-fluorouridine, C5-iodouridine, C5-propynyl-uridine, C5-propynyl-cytidine, C5-methylcytidine, 2-aminoadenosine, 7-deazaadenosine, 7-deazaguanosine, 8-oxoadenosine, 8-oxoguanosine, O(6)-methylguanine, and 2-thiocytidine); chemically modified bases; biologically modified bases (e.g., methylated bases); intercalated bases; modified sugars (e.g., 2′-fluororibose, ribose, 2′-deoxyribose, arabinose, and hexose); and/or modified phosphate groups (e.g., phosphorothioates and 5′-N-phosphoramidite linkages). In some embodiments, an RNA is an RNA associated with the Cas9 system. For example, the RNA may be a CRISPR RNA (crRNA), a trans-encoded small RNA (tracrRNA), a single guide RNA (sgRNA), or a guide RNA (gRNA).

[0092] The term “nucleic acid editing domain,” as used herein refers to a protein or enzyme capable of making one or more modifications (e.g., deamination of a cytidine residue) to a nucleic acid (e.g., DNA or RNA). Exemplary nucleic acid editing domains include, but are not limited to a deaminase, a nuclease, a nickase, a recombinase, a methyltransferase, a methylase, an acetylase, an acetyltransferase, a transcriptional activator, or a transcriptional repressor domain. In some embodiments, the nucleic acid editing domain is a deaminase, a nuclease, a nickase, a recombinase, a methyltransferase, a methylase, an acetylase, an acetyltransferase, a transcriptional activator, or a transcriptional repressor domain. In some embodiments, the nucleic acid editing domain is a deaminase domain (e.g., a cytidine deaminase, such as an APOBEC or an AID deaminase, or an adenosine deaminase, such as ecTadA). In some embodiments, the nucleic acid editing domain is a cytidine deaminase domain (e.g., an APOBEC or an AID deaminase). In some embodiments, the nucleic acid editing domain is an adenosine deaminase domain (e.g., an ecTadA).

[0093] The term “nuclear localization sequence” or “NLS” refers to an amino acid sequence that promotes import of a protein into the cell nucleus, for example, by nuclear transport. Nuclear localization sequences are known in the art and would be apparent to the skilled artisan. For example, NLS sequences are described in Plank et al., international PCT application, PCT/EP2000/011690, filed Nov. 23, 2000, published as WO/2001/038547 on May 31, 2001, the contents of which are incorporated herein by reference for its disclosure of exemplary nuclear localization sequences. In some embodiments, a NLS comprises the amino acid sequence PKKKRKV (SEQ ID NO: 113) or MDSLLMNRRKFLYQFKNVRWAKGRRETYLC (SEQ ID NO: 114).

[0094] The term “proliferative disease,” as used herein, refers to any disease in which cell or tissue homeostasis is disturbed in that a cell or cell population exhibits an abnormally elevated proliferation rate. Proliferative diseases include hyperproliferative diseases, such as pre-neoplastic hyperplastic conditions and neoplastic diseases. Neoplastic diseases are characterized by an abnormal proliferation of cells and include both benign and malignant neoplasias. Malignant neoplasia is also referred to as cancer.

[0095] The terms “protein,” “peptide,” and “polypeptide” are used interchangeably herein, and refer to a polymer of amino acid residues linked together by peptide (amide) bonds. The terms refer to a protein, peptide, or polypeptide of any size, structure, or function. Typically, a protein, peptide, or polypeptide will be at least three amino acids long. A protein, peptide, or polypeptide may refer to an individual protein or a collection of proteins. One or more of the amino acids in a protein, peptide, or polypeptide may be modified, for example, by the addition of a chemical entity such as a carbohydrate group, a hydroxyl group, a phosphate group, a farnesyl group, an isofarnesyl group, a fatty acid group, a linker for conjugation, functionalization, or other modification, etc. A protein, peptide, or polypeptide may also be a single molecule or may be a multi-molecular complex. A protein, peptide, or polypeptide may be just a fragment of a naturally occurring protein or peptide. A protein, peptide, or polypeptide may be naturally occurring, or synthetic, or any combination thereof. The term “fusion protein” as used herein refers to a hybrid polypeptide which comprises protein domains from at least two different proteins, or at least two identical protein domains (i.e., a homodimer). One protein may be located at the amino-terminal (N-terminal) portion of the fusion protein or at the carboxy-terminal (C-terminal) protein thus forming an “amino-terminal fusion protein” or a “carboxy-terminal fusion protein,” respectively. A protein may comprise different domains, for example, a nucleic acid binding domain (e.g., the gRNA binding domain of Cas9 that directs the binding of the protein to a target site) and a nucleic acid cleavage domain or a catalytic domain of a nucleic acid editing protein. In some embodiments, a protein comprises a proteinaceous part, e.g., an amino acid sequence constituting a nucleic acid binding domain, and an organic compound, e.g., a compound that can act as a nucleic acid cleavage agent. In some embodiments, a protein is in a complex with, or is in association with, a nucleic acid, e.g., RNA. Any of the proteins provided herein may be produced by any method known in the art. For example, the proteins provided herein may be produced via protein expression and purification, which is especially suited for fusion proteins comprising a peptide linker. Methods for protein expression and purification are well known, and include those described by Green and Sambrook, Molecular Cloning: A Laboratory Manual (4^{th} ed., Cold Spring Harbor Laboratory Press, Cold Spring Harbor, N.Y. (2012)), the entire contents of which are incorporated herein by reference.

[0096] The term “subject,” as used herein, refers to an individual organism, for example, an individual mammal. In some embodiments, the subject is a human. In some embodiments, the subject is a non-human mammal. In some embodiments, the subject is a non-human primate. In some embodiments, the subject is a rodent. In some embodiments, the subject is a sheep, a goat, a cattle, a cat, or a dog. In some embodiments, the subject is a vertebrate, an amphibian, a reptile, a fish, an insect, a fly, or a nematode. In some embodiments, the subject is a plant or a fungus. In some embodiments, the subject is a research animal (e.g., a rat, a mouse, or a non-human primate). In some embodiments, the subject is genetically engineered, e.g., a genetically engineered non-human subject. The subject may be of either sex, of any age, and at any stage of development.

[0097] The term “target site” refers to a nucleic acid sequence or a nucleotide within a nucleic acid that is targeted or modified by an effector domain that is fused to a napDNAbp. In some embodiments, a “target site” is a sequence within a nucleic acid molecule that is deaminated by a deaminase or a fusion protein comprising a deaminase, (e.g., a dCas9-deaminase fusion protein or a Cas9n-deaminase fusion protein provided herein). In some embodiments, the target site refers to a sequence within a nucleic acid molecule that is cleaved by a napDNAbp (e.g., a nuclease active Cas9 domain) provided herein. The target site is contained within a target sequence (e.g., a target sequence comprising a reporter gene, or a target sequence comprising a gene located in a safe harbor locus).

[0098] The terms “treatment,” “treat,” and “treating,” refer to a clinical intervention aimed to reverse, alleviate, delay the onset of, or inhibit the progress of a disease or disorder, or one or more symptoms thereof, as described herein. As used herein, the terms “treatment,” “treat,” and “treating” refer to a clinical intervention aimed to reverse, alleviate, delay the onset of, or inhibit the progress of a disease or disorder, or one or more symptoms thereof, as described herein. In some embodiments, treatment may be administered after one or more symptoms have developed and/or after a disease has been diagnosed. In other embodiments, treatment may be administered in the absence of symptoms, e.g., to prevent or delay onset of a symptom or inhibit onset or progression of a disease. For example, treatment may be administered to a susceptible individual prior to the onset of symptoms (e.g., in light of a history of symptoms and/or in light of genetic or other susceptibility factors). Treatment may also be continued after symptoms have resolved, for example, to prevent or delay their recurrence.

[0099] The term “pharmaceutical composition,” as used herein, refers to a composition that can be administrated to a subject in the context of treatment of a disease or disorder. In some embodiments, a pharmaceutical composition comprises an active ingredient, e.g., a nuclease or a nucleic acid encoding a nuclease, and a pharmaceutically acceptable excipient.

[0100] The term “uracil glycosylase inhibitor” or “UGI,” as used herein, refers to a protein that is capable of inhibiting a uracil-DNA glycosylase base-excision repair enzyme. In some embodiments, a UGI domain comprises a wild-type UGI or a UGI as set forth in SEQ ID NO: 115-120. In some embodiments, the UGI proteins provided herein include fragments of UGI and proteins homologous to a UGI or a UGI fragment. For example, in some embodiments, a UGI domain comprises a fragment of the amino acid sequence set forth in SEQ ID NO: 115-120. In some embodiments, a UGI fragment comprises an amino acid sequence that comprises at least 60%, at least 65%, at least 70%, at least 75%, at least 80%, at least 85%, at least 90%, at least 95%, at least 96%, at least 97%, at least 98%, at least 99%, or at least 99.5% of the amino acid sequence as set forth in SEQ ID NO: 115-120. In some embodiments, a UGI comprises an amino acid sequence homologous to the amino acid sequence set forth in SEQ ID NO: 115-120, or an amino acid sequence homologous to a fragment of the amino acid sequence set forth in SEQ ID NO: 115-120. In some embodiments, proteins comprising UGI or fragments of UGI or homologs of UGI or UGI fragments are referred to as “UGI variants.” A UGI variant shares homology to UGI, or a fragment thereof. For example a UGI variant is at least 70% identical, at least 75% identical, at least 80% identical, at least 85% identical, at least 90% identical, at least 95% identical, at least 96% identical, at least 97% identical, at least 98% identical, at least 99% identical, at least 99.5% identical, or at least 99.9% identical to a wild type UGI or a UGI as set forth in SEQ ID NO: 115-120. In some embodiments, the UGI variant comprises a fragment of UGI, such that the fragment is at least 70% identical, at least 80% identical, at least 90% identical, at least 95% identical, at least 96% identical, at least 97% identical, at least 98% identical, at least 99% identical, at least 99.5% identical, or at least 99.9% to the corresponding fragment of wild-type UGI or a UGI as set forth in SEQ ID NO: 115-120. In some embodiments, the UGI comprises the amino acid sequence of SEQ ID NO: 115, as set forth below. Exemplary Uracil-DNA glycosylase inhibitor (UGI; >sp|P14739|UNGI_BPPB2)

(SEQ ID NO: 115)
MTNLSDIIEKETGKQLVIQESILMLPEEVEEVIGNKPESDILVHTAYDE
STDENVMLLTSDAPEYKPWALVIQDSNGENKIKML.

[0101] The term “catalytically inactive inosine-specific nuclease,” or “dead inosine-specific nuclease (dISN),” as used herein, refers to a protein that is capable of inhibiting an inosine-specific nuclease. Without wishing to be bound by any particular theory, catalytically inactive inosine glycosylases (e.g., alkyl adenine glycosylase [AAG]) will bind inosine, but will not create an abasic site or remove the inosine, thereby sterically blocking the newly-formed inosine moiety from DNA damage/repair mechanisms. In some embodiments, the catalytically inactive inosine-specific nuclease may be capable of binding an inosine in a nucleic acid but does not cleave the nucleic acid. Exemplary catalytically inactive inosine-specific nucleases include, without limitation, catalytically inactive alkyl adenosine glycosylase (AAG nuclease), for example, from a human, and catalytically inactive endonuclease V (EndoV nuclease), for example, from E. coli. In some embodiments, the catalytically inactive AAG nuclease comprises an E125Q mutation as shown in SEQ ID NO: 40, or a corresponding mutation in another AAG nuclease. In some embodiments, the catalytically inactive AAG nuclease comprises the amino acid sequence set forth in SEQ ID NO: 40. In some embodiments, the catalytically inactive EndoV nuclease comprises an D35A mutation as shown in SEQ ID NO: 41, or a corresponding mutation in another EndoV nuclease. In some embodiments, the catalytically inactive EndoV nuclease comprises the amino acid sequence set forth in SEQ ID NO: 41. It should be appreciated that other catalytically inactive inosine-specific nucleases (dISNs) would be apparent to the skilled artisan and are within the scope of this disclosure. Various examples include:

[0102] Truncated AAG (H. sapiens) nuclease (E125Q); mutated residue shown in bold.

(SEQ ID NO: 116)
KGHLTRLGLEFFDQPAVPLARAFLGQVLVRRLPNGTELRGRIVETQAYL
GPEDEAAHSRGGRQTPRNRGMFMKPGTLYVYIIYGMYFCMNISSQGDGA
CVLLRALEPLEGLETMRQLRSTLRKGTASRVLKDRELCSGPSKLCQALA
INKSFDQRDLAQDEAVWLERGPLEPSEPAVVAAARVGVGHAGEWARKPL
RFYVRGSPWVSVVDRVAEQDTQA;

and

[0103] EndoV nuclease (D35A); mutated residue shown in bold.

(SEQ ID NO: 117)
DLASLRAQQIELASSVIREDRLDKDPPDLIAGAAVGFEQGGEVTRAAMV
LLKYPSLELVEYKVARIATTMPYIPGFLSFREYPALLAAWEMLSQKPDL
VFVDGHGISHPRRLGVASHFGLLVDVPTIGVAKKRLCGKFEPLSSEPGA
LAPLMDKGEQLAWVWRSKARCNPLFIATGHRVSVDSALAWVQRCMKGYR
LPEPTRWADAVASERPAFVRYTANQP.

### DETAILED DESCRIPTION OF CERTAIN EMBODIMENTS

[0104] Streptococcus pyogenes Cas9 (SpCas9) is a widely-utilized genome-editing tool, but is restricted in genome targeting by the requirement for an NGG PAM sequence, which can be limiting for precision genome editing applications such as base editing, homology-directed repair, and predictable template-free genome editing. While SpCas9 variants with alternative PAM requirements have been previously reported, their targeting scope remains restricted primarily to G-containing PAMs.

[0105] The present application provides three SpCas9 variants capable of recognizing NRTH, NRRH, and NRCH PAMs, respectively, using an improved phage-assisted continuous evolution (PACE) Cas9 binding selection. These PAM sequence preferences are provided for these SpCas9 variants, along with the previously reported SpCas9-NG variant, by cytosine base editing, indel formation, and adenine base editing in a panel of 64 mammalian potential cell target sites. In further aspects, the present application provides the editing efficiencies of the SpCas9 variants on a mammalian cell library of ˜12,000 genomically integrated sgRNA/protospacer targets.

[0106] Some aspects of this disclosure provide Cas9 proteins (e.g., SgCas9) that efficiently target nucleic acid sequences that do not include the canonical PAM sequence (5′-NGG-3′, where N is any nucleotide, for example A, T, G, or C) at their 3′-ends. It should be appreciated that the phrase “Cas9 proteins” can refer to isolated Cas9 proteins or Cas9 domains as part of fusion proteins. In some embodiments, the Cas9 domains provided herein comprise one or more mutations identified in directed evolution experiments using a target sequence library comprising randomized PAM sequences. The non-PAM restricted Cas9 domains provided herein are useful for targeting DNA sequences that do not comprise the canonical PAM sequence at their 3′-end and thus greatly extend the applicability and usefulness of Cas9 technology for gene editing. The evolution of Cas9 domains that are not restricted to the canonical 5′-NGG-3′ PAM sequence has been previously described, for example, in International Patent Application No., PCT/US2016/058345, filed Oct. 22, 2016, and published as Patent Publication No. WO 2017/070633, published Apr. 27, 2017, entitled “Evolved Cas9 Proteins for Gene Editing” which is herein incorporated by reference in its entirety. In addition to the Cas9 mutations identified and proteins listed in Publication No. WO 2017/070633, provided herein are novel additional mutations and Cas9 domains that have activity on target sequences comprising non-canonical PAM sequences. It should be understood that any of the mutations listed in Patent Publication No. WO 2017/070633 may be combined with or used in lieu of any of the mutations or Cas9 domains disclosed herein, unless explicity stated otherwise.

[0107] Some aspects of this disclosure provide fusion proteins that comprise a Cas9 domain and an effector domain, for example, a nucleic acid editing domain, such as a deaminase domain, a nuclease domain, a nickase domain, a recombinase domain, a methyltransferase domain, a methylase domain, an acetylase domain, an acetyltransferase domain, a transcriptional activator domain, or a transcriptional repressor domain.

[0108] The deamination of a nucleobase by a deaminase can lead to a point mutation at the specific residue, which is referred to herein as nucleic acid editing. Fusion proteins comprising a Cas9 domain or variant thereof and a nucleic acid editing domain can thus be used for the targeted editing of nucleic acid sequences. Such fusion proteins are useful for targeted editing of DNA in vitro, e.g., for the generation of mutant cells or animals; for the introduction of targeted mutations, e.g., for the correction of genetic defects in cells ex vivo, e.g., in cells obtained from a subject that are subsequently re-introduced into the same or another subject; and for the introduction of targeted mutations, e.g., the correction of genetic defects or the introduction of deactivating mutations in disease-associated genes in a subject in vivo. Typically, the Cas9 domain of the fusion proteins described herein is a Cas9 domain comprising one or more mutations provided herein (e.g., an “xCas9” domain) that has impaired nuclease activity (e.g., a nuclease-inactive xCas9 domain). For example, in some embodiments, the Cas9 domain comprises a D10A and/or a H840A mutation in the amino acid sequence provided in SEQ ID NO: 2. Methods for the use of fusion proteins comprising Cas9 as described herein are also provided.

[0109] Additional suitable nuclease-inactive Cas9 domains will be apparent to those of skill in the art based on this disclosure. Such additional exemplary suitable nuclease-inactive Cas9 domains include, but are not limited to, D10A, D839A, H840A, N863A, D10A/D839A, D10A/H840A, D10A/N863A, D839A/H840A, D839A/N863A, D10A/D839A/H840A, and D10A/D839A/H840A/N863A mutant proteins (See, e.g., Prashant et al., “Cas9 transcriptional activators for target specificity screening and paired nickases for cooperative genome engineering,” Nature Biotechnology, 2013; 31(9): 833-838, the entire contents of which are incorporated herein by reference). In some embodiments, the Cas9 domain comprises a D10A mutation of the amino acid sequence provided in SEQ ID NO: 2, or a corresponding mutation in any of the amino acid sequences provided in SEQ ID NOs: 2.

[0110] The base editors disclosed herein may also comprise a circular permutant Cas9 variant. The term “circularly permuted Cas9” refers to any Cas9 protein, or variant thereof, that occurs or has been modify to occur as a circular permutant, whereby its N- and C-termini have been topically rearranged. Such circularly permuted Cas9 proteins (“CP-Cas9”), or variants thereof, retain the ability to bind DNA when complexed with a guide RNA (gRNA). See, Oakes et al., “Protein Engineering of Cas9 for enhanced function,” Methods Enzymol, 2014, 546: 491-511 and Oakes et al., “CRISPR-Cas9 Circular Permutants as Programmable Scaffolds for Genome Modification,” Cell, Jan. 10, 2019, 176: 254-267, each of are incorporated herein by reference. The instant disclosure contemplates any previously known CP-Cas9 or use a new CP-Cas9 so long as the resulting circularly permuted protein retains the ability to bind DNA when complexed with a guide RNA (gRNA).

[0111] Any of the Cas9 proteins described herein, including any variant, ortholog, or naturally occurring Cas9 or equivalent thereof, may be reconfigured as a circular permutant variant.

[0112] In various embodiments, the circular permutants of Cas9 may have the following structure: N-terminus-[original C-terminus]-[optional linker]-[original N-terminus]-C-terminus.

[0113] As an example, the present disclosure contemplates the following circular permutants of S. pyogenes Cas9 (based on 1368 amino acids of UniProtKB-Q99ZW2 (CAS9_STRP1) of SEQ ID NO: 6:

[0114] N-terminus-[1268-1368]-[optional linker]-[1-1267]-C-terminus;

[0115] N-terminus-[1168-1368]-[optional linker]-[1-1167]-C-terminus;

[0116] N-terminus-[1068-1368]-[optional linker]-[1-1067]-C-terminus;

[0117] N-terminus-[968-1368]-[optional linker]-[1-967]-C-terminus;

[0118] N-terminus-[868-1368]-[optional linker]-[1-867]-C-terminus;

[0119] N-terminus-[768-1368]-[optional linker]-[1-767]-C-terminus;

[0120] N-terminus-[668-1368]-[optional linker]-[1-667]-C-terminus;

[0121] N-terminus-[568-1368]-[optional linker]-[1-567]-C-terminus;

[0122] N-terminus-[468-1368]-[optional linker]-[1-467]-C-terminus;

[0123] N-terminus-[368-1368]-[optional linker]-[1-367]-C-terminus;

[0124] N-terminus-[268-1368]-[optional linker]-[1-267]-C-terminus;

[0125] N-terminus-[168-1368]-[optional linker]-[1-167]-C-terminus;

[0126] N-terminus-[68-1368]-[optional linker]-[1-67]-C-terminus; or

[0127] N-terminus-[10-1368]-[optional linker]-[1-9]-C-terminus, or the corresponding circular permutants of other Cas9 proteins (including other Cas9 orthologs, variants, etc).

[0128] In particular embodiments, the circular permuant Cas9 has the following structure (based on S. pyogenes Cas9 (SEQ ID NO: 6):

[0129] N-terminus-[102-1368]-[optional linker]-[1-101]-C-terminus;

[0130] N-terminus-[1028-1368]-[optional linker]—[1-1027]-C-terminus;

[0131] N-terminus-[1041-1368]-[optional linker]-[1-1043]-C-terminus;

[0132] N-terminus-[1249-1368]-[optional linker]-[1-1248]-C-terminus; or

[0133] N-terminus-[1300-1368]-[optional linker]-[1-1299]-C-terminus, or the corresponding circular permutants of other Cas9 proteins (including other Cas9 orthologs, variants, etc).

[0134] In still other embodiments, the circular permutant Cas9 has the following structure (based on S. pyogenes Cas9 (SEQ ID NO: 6):

[0135] N-terminus-[103-1368]-[optional linker]-[1-102]-C-terminus;

[0136] N-terminus-[1029-1368]-[optional linker]-[1-1028]-C-terminus;

[0137] N-terminus-[1042-1368]-[optional linker]-[1-1041]-C-terminus;

[0138] N-terminus-[1250-1368]-[optional linker]-[1-1249]-C-terminus; or

[0139] N-terminus-[1301-1368]-[optional linker]-[1-1300]-C-terminus, or the corresponding circular permutants of other Cas9 proteins (including other Cas9 orthologs, variants, etc).

[0140] In some embodiments, the Cas9 variant comprises a fragment of Cas9 (e.g., a gRNA binding domain or a DNA-cleavage domain), such that the fragment is at least about 70% identical, at least about 80% identical, at least about 90% identical, at least about 95% identical, at least about 96% identical, at least about 97% identical, at least about 98% identical, at least about 99% identical, at least about 99.5% identical, or at least about 99.9% identical to the corresponding fragment of wild type Cas9. In some embodiments, the fragment is is at least 30%, at least 35%, at least 40%, at least 45%, at least 50%, at least 55%, at least 60%, at least 65%, at least 70%, at least 75%, at least 80%, at least 85%, at least 90%, at least 95% identical, at least 96%, at least 97%, at least 98%, at least 99%, or at least 99.5% of the amino acid length of a corresponding wild type Cas9. In some embodiments, the Cas9 fragment is at least 100 amino acids in length. In some embodiments, the fragment is at least 100, 150, 200, 250, 300, 350, 400, 450, 500, 550, 600, 650, 700, 750, 800, 850, 900, 950, 1000, 1050, 1100, 1150, 1200, 1250, or at least 1300 amino acids in length. In some embodiments, the fragment binds crRNA and tracrRNA or sgRNA, but does not comprise a functional nuclease domain, e.g., in that it comprises only a truncated version of a nuclease domain or no nuclease domain at all.

[0141] In some embodiments, the circular permutant can be formed by linking a C-terminal fragment of a Cas9 to an N-terminal fragment of a Cas9, either directly or by using a linker, such as an amino acid linker. In some embodiments, The C-terminal fragment may correspond to the C-terminal 95% or more of the amino acids of a Cas9 (e.g., amino acids about 1300-1368), or the C-terminal 90%, 85%, 80%, 75%, 70%, 65%, 60%, 55%, 50%, 45%, 40%, 35%, 30%, 25%, 20%, 15%, 10%, or 5% or more of a Cas9 (e.g., SEQ ID NO: 6). The N-terminal portion may correspond to the N-terminal 95% or more of the amino acids of a Cas9 (e.g., amino acids about 1-1300), or the N-terminal 90%, 85%, 80%, 75%, 70%, 65%, 60%, 55%, 50%, 45%, 40%, 35%, 30%, 25%, 20%, 15%, 10%, or 5% or more of a Cas9 (e.g., of SEQ ID NO: 6).

[0142] In some embodiments, the circular permutant can be formed by linking a C-terminal fragment of a Cas9 to an N-terminal fragment of a Cas9, either directly or by using a linker, such as an amino acid linker. In some embodiments, the C-terminal fragment that is rearranged to the N-terminus, includes or corresponds to the C-terminal 30% or less of the amino acids of a Cas9 (e.g., amino acids 1012-1368 of SEQ ID NO: 6). In some embodiments, the C-terminal fragment that is rearranged to the N-terminus, includes or corresponds to the C-terminal 30%, 29%, 28%, 27%, 26%, 25%, 24%, 23%, 22%, 21%, 20%, 19%, 18%, 17%, 16%, 15%, 14%, 13%, 12%, 11%, 10%, 9%, 8%, 7%, 6%, 5%, 4%, 3%, 2%, or 1% of the amino acids of a Cas9 (e.g., the Cas9 of SEQ ID NO: 6). In some embodiments, the C-terminal fragment that is rearranged to the N-terminus, includes or corresponds to the C-terminal 410 residues or less of a Cas9 (e.g., the Cas9 of SEQ ID NO: 6). In some embodiments, the C-terminal portion that is rearranged to the N-terminus, includes or corresponds to the C-terminal 410, 400, 390, 380, 370, 360, 350, 340, 330, 320, 310, 300, 290, 280, 270, 260, 250, 240, 230, 220, 210, 200, 190, 180, 170, 160, 150, 140, 130, 120, 110, 100, 90, 80, 70, 60, 50, 40, 30, 20, or 10 residues of a Cas9 (e.g., the Cas9 of SEQ ID NO: 6). In some embodiments, the C-terminal portion that is rearranged to the N-terminus, includes or corresponds to the C-terminal 357, 341, 328, 120, or 69 residues of a Cas9 (e.g., the Cas9 of SEQ ID NO: 6).

[0143] In other embodiments, circular permutant Cas9 variants may be defined as a topological rearrangement of a Cas9 primary structure based on the following method, which is based on S. pyogenes Cas9 of SEQ ID NO: 6: (a) selecting a circular permutant (CP) site corresponding to an internal amino acid residue of the Cas9 primary structure, which dissects the original protein into two halves: an N-terminal region and a C-terminal region; (b) modifying the Cas9 protein sequence (e.g., by genetic engineering techniques) by moving the original C-terminal region (comprising the CP site amino acid) to preceed the original N-terminal region, thereby forming a new N-terminus of the Cas9 protein that now begins with the CP site amino acid residue. The CP site can be located in any domain of the Cas9 protein, including, for example, the helical-II domain, the RuvCIII domain, or the CTD domain. For example, the CP site may be located (relative to the S. pyogenes Cas9 of SEQ ID NO: 6) at original amino acid residue 181, 199, 230, 270, 310, 1010, 1016, 1023, 1029, 1041, 1247, 1249, or 1282. Thus, once relocated to the N-terminus, original amino acid 181, 199, 230, 270, 310, 1010, 1016, 1023, 1029, 1041, 1247, 1249, or 1282 would become the new N-terminal amino acid. Nomenclature of these CP-Cas9 proteins may be referred to as Cas9-CP¹⁸¹, Cas9-CP¹⁹⁹, Cas9-CP²³⁰, Cas9-CP²⁷⁰, Cas9-CP³¹⁰, Cas9-CP¹⁰¹⁰, Cas9-CP¹⁰¹⁶, Cas9-CP¹⁰²³, Cas9-CP¹⁰²⁹, Cas9-CP¹⁰⁴¹, Cas9-CP¹²⁴⁷, Cas9-CP¹²⁴⁹, and Cas9-CP¹²⁸², respectively. This description is not meant to be limited to making CP variants from SEQ ID NO: 6, but may be implemented to make CP variants in any Cas9 sequence, either at CP sites that correspond to these positions, or at other CP sites entirely. This description is not meant to limit the specific CP sites in any way. Virtually any CP site may be used to form a CP-Cas9 variant.

[0144] Exemplary CP-Cas9 amino acid sequences, based on the Cas9 of SEQ ID NO: 6, are provided below in which linker sequences are indicated by underlining and optional methionine (M) residues are indicated in bold. It should be appreciated that the disclosure provides CP-Cas9 sequences that do not include a linker sequence or that include different linker sequences. It should be appreciated that CP-Cas9 sequences may be based on Cas9 sequences other than that of SEQ ID NO: 6 and any examples provided herein are not meant to be limiting.

CP1012
(SEQ ID NO: 12)
DYKVYDVRKMIAKSEQEIGKATAKYFFYSNIMNFFKTEITLANGEIRKRPLIETNGETGEIVWDKGRD
FATVRKVLSMPQVNIVKKTEVQTGGFSKESILPKRNSDKLIARKKDWDPKKYGGFDSPTVAYSVLVVA
KVEKGKSKKLKSVKELLGITIMERSSFEKNPIDFLEAKGYKEVKKDLIIKLPKYSLFELENGRKRMLA
SAGELQKGNELALPSKYVNFLYLASHYEKLKGSPEDNEQKQLFVEQHKHYLDEIIEQISEFSKRVILA
DANLDKVLSAYNKHRDKPIREQAENIIHLFTLTNLGAPAAFKYFDTTIDRKRYTSTKEVLDATLIHQS
ITGLYETRIDLSQLGGDGGSGGSGGSGGSGGSGGSGGDKKYSIGLAIGTNSVGWAVITDEYKVPSKKF
KVLGNTDRHSIKKNLIGALLFDSGETAEATRLKRTARRRYTRRKNRICYLQEIFSNEMAKVDDSFFHR
LEESFLVEEDKKHERHPIFGNIVDEVAYHEKYPTIYHLRKKLVDSTDKADLRLIYLALAHMIKFRGHF
LIEGDLNPDNSDVDKLFIQLVQTYNQLFEENPINASGVDAKAILSARLSKSRRLENLIAQLPGEKKNG
LFGNLIALSLGLTPNFKSNFDLAEDAKLQLSKDTYDDDLDNLLAQIGDQYADLFLAAKNLSDAILLSD
ILRVNTEITKAPLSASMIKRYDEHHQDLTLLKALVRQQLPEKYKEIFFDQSKNGYAGYIDGGASQEEF
YKFIKPILEKMDGTEELLVKLNREDLLRKQRTFDNGSIPHQIHLGELHAILRRQEDFYPFLKDNREKI
EKILTFRIPYYVGPLARGNSRFAWMTRKSEETITPWNFEEVVDKGASAQSFIERMTNFDKNLPNEKVL
PKHSLLYEYFTVYNELTKVKYVTEGMRKPAFLSGEQKKAIVDLLFKTNRKVTVKQLKEDYFKKIECFD
SVEISGVEDRFNASLGTYHDLLKIIKDKDFLDNEENEDILEDIVLTLTLFEDREMIEERLKTYAHLFD
DKVMKQLKRRRYTGWGRLSRKLINGIRDKQSGKTILDFLKSDGFANRNFMQLIHDDSLTFKEDIQKAQ
VSGQGDSLHEHIANLAGSPAIKKGILQTVKVVDELVKVMGRHKPENIVIEMARENQTTQKGQKNSRER
MKRIEEGIKELGSQILKEHPVENTQLQNEKLYLYYLQNGRDMYVDQELDINRLSDYDVDHIVPQSFLK
DDSIDNKVLTRSDKNRGKSDNVPSEEVVKKMKNYWRQLLNAKLITQRKFDNLTKAERGGLSELDKAGF
IKRQLVETRQITKHVAQILDSRMNTKYDENDKLIREVKVITLKSKLVSDFRKDFQFYKVREINNYHHA
HDAYLNAVVGTALIKKYPKLESEFVYG
CP1028
(SEQ ID NO: 13)
EIGKATAKYFFYSNIMNFFKTEITLANGEIRKRPLIETNGETGEIVWDKGRDFATVRKVLSMPQVNIV
KKTEVQTGGFSKESILPKRNSDKLIARKKDWDPKKYGGFDSPTVAYSVLVVAKVEKGKSKKLKSVKEL
LGITIMERSSFEKNPIDFLEAKGYKEVKKDLIIKLPKYSLFELENGRKRMLASAGELQKGNELALPSK
YVNFLYLASHYEKLKGSPEDNEQKQLFVEQHKHYLDEIIEQISEFSKRVILADANLDKVLSAYNKHRD
KPIREQAENIIHLFTLTNLGAPAAFKYFDTTIDRKRYTSTKEVLDATLIHQSITGLYETRIDLSQLGG
DGGSGGSGGSGGSGGSGGSGGMDKKYSIGLAIGTNSVGWAVITDEYKVPSKKFKVLGNTDRHSIKKNL
IGALLFDSGETAEATRLKRTARRRYTRRKNRICYLQEIFSNEMAKVDDSFFHRLEESFLVEEDKKHER
HPIFGNIVDEVAYHEKYPTIYHLRKKLVDSTDKADLRLIYLALAHMIKFRGHFLIEGDLNPDNSDVDK
LFIQLVQTYNQLFEENPINASGVDAKAILSARLSKSRRLENLIAQLPGEKKNGLFGNLIALSLGLTPN
FKSNFDLAEDAKLQLSKDTYDDDLDNLLAQIGDQYADLFLAAKNLSDAILLSDILRVNTEITKAPLSA
SMIKRYDEHHQDLTLLKALVRQQLPEKYKEIFFDQSKNGYAGYIDGGASQEEFYKFIKPILEKMDGTE
ELLVKLNREDLLRKQRTFDNGSIPHQIHLGELHAILRRQEDFYPFLKDNREKIEKILTFRIPYYVGPL
ARGNSRFAWMTRKSEETITPWNFEEVVDKGASAQSFIERMTNFDKNLPNEKVLPKHSLLYEYFTVYNE
LTKVKYVTEGMRKPAFLSGEQKKAIVDLLFKTNRKVTVKQLKEDYFKKIECFDSVEISGVEDRFNASL
GTYHDLLKIIKDKDFLDNEENEDILEDIVLTLTLFEDREMIEERLKTYAHLFDDKVMKQLKRRRYTGW
GRLSRKLINGIRDKQSGKTILDFLKSDGFANRNFMQLIHDDSLTFKEDIQKAQVSGQGDSLHEHIANL
AGSPAIKKGILQTVKVVDELVKVMGRHKPENIVIEMARENQTTQKGQKNSRERMKRIEEGIKELGSQI
LKEHPVENTQLQNEKLYLYYLQNGRDMYVDQELDINRLSDYDVDHIVPQSFLKDDSIDNKVLTRSDKN
RGKSDNVPSEEVVKKMKNYWRQLLNAKLITQRKFDNLTKAERGGLSELDKAGFIKRQLVETRQITKHV
AQILDSRMNTKYDENDKLIREVKVITLKSKLVSDFRKDFQFYKVREINNYHHAHDAYLNAVVGTALIK
KYPKLESEFVYGDYKVYDVRKMIAKSEQ
CP1041
(SEQ ID NO: 14)
NIMNFFKTEITLANGEIRKRPLIETNGETGEIVWDKGRDFATVRKVLSMPQVNIVKKTEVQTGGFSKE
SILPKRNSDKLIARKKDWDPKKYGGFDSPTVAYSVLVVAKVEKGKSKKLKSVKELLGITIMERSSFEK
NPIDFLEAKGYKEVKKDLIIKLPKYSLFELENGRKRMLASAGELQKGNELALPSKYVNFLYLASHYEK
LKGSPEDNEQKQLFVEQHKHYLDEIIEQISEFSKRVILADANLDKVLSAYNKHRDKPIREQAENIIHL
FTLTNLGAPAAFKYFDTTIDRKRYTSTKEVLDATLIHQSITGLYETRIDLSQLGGDGGSGGSGGSGGS
GGSGGSGGDKKYSIGLAIGTNSVGWAVITDEYKVPSKKFKVLGNTDRHSIKKNLIGALLFDSGETAEA
TRLKRTARRRYTRRKNRICYLQEIFSNEMAKVDDSFFHRLEESFLVEEDKKHERHPIFGNIVDEVAYH
EKYPTIYHLRKKLVDSTDKADLRLIYLALAHMIKFRGHFLIEGDLNPDNSDVDKLFIQLVQTYNQLFE
ENPINASGVDAKAILSARLSKSRRLENLIAQLPGEKKNGLFGNLIALSLGLTPNFKSNFDLAEDAKLQ
LSKDTYDDDLDNLLAQIGDQYADLFLAAKNLSDAILLSDILRVNTEITKAPLSASMIKRYDEHHQDLT
LLKALVRQQLPEKYKEIFFDQSKNGYAGYIDGGASQEEFYKFIKPILEKMDGTEELLVKLNREDLLRK
QRTFDNGSIPHQIHLGELHAILRRQEDFYPFLKDNREKIEKILTFRIPYYVGPLARGNSRFAWMTRKS
EETITPWNFEEVVDKGASAQSFIERMTNFDKNLPNEKVLPKHSLLYEYFTVYNELTKVKYVTEGMRKP
AFLSGEQKKAIVDLLFKTNRKVTVKQLKEDYFKKIECFDSVEISGVEDRFNASLGTYHDLLKIIKDKD
FLDNEENEDILEDIVLTLTLFEDREMIEERLKTYAHLFDDKVMKQLKRRRYTGWGRLSRKLINGIRDK
QSGKTILDFLKSDGFANRNFMQLIHDDSLTFKEDIQKAQVSGQGDSLHEHIANLAGSPAIKKGILQTV
KVVDELVKVMGRHKPENIVIEMARENQTTQKGQKNSRERMKRIEEGIKELGSQILKEHPVENTQLQNE
KLYLYYLQNGRDMYVDQELDINRLSDYDVDHIVPQSFLKDDSIDNKVLTRSDKNRGKSDNVPSEEVVK
KMKNYWRQLLNAKLITQRKFDNLTKAERGGLSELDKAGFIKRQLVETRQITKHVAQILDSRMNTKYDE
NDKLIREVKVITLKSKLVSDFRKDFQFYKVREINNYHHAHDAYLNAVVGTALIKKYPKLESEFVYGDY
KVYDVRKMIAKSEQEIGKATAKYFFYS
CP1249
(SEQ ID NO: 15)
PEDNEQKQLFVEQHKHYLDEIIEQISEFSKRVILADANLDKVLSAYNKHRDKPIREQAENIIHLFTLT
NLGAPAAFKYFDTTIDRKRYTSTKEVLDATLIHQSITGLYETRIDLSQLGGDGGSGGSGGSGGSGGSG
GSGGMDKKYSIGLAIGTNSVGWAVITDEYKVPSKKFKVLGNTDRHSIKKNLIGALLFDSGETAEATRL
KRTARRRYTRRKNRICYLQEIFSNEMAKVDDSFFHRLEESFLVEEDKKHERHPIFGNIVDEVAYHEKY
PTIYHLRKKLVDSTDKADLRLIYLALAHMIKFRGHFLIEGDLNPDNSDVDKLFIQLVQTYNQLFEENP
INASGVDAKAILSARLSKSRRLENLIAQLPGEKKNGLFGNLIALSLGLTPNFKSNFDLAEDAKLQLSK
DTYDDDLDNLLAQIGDQYADLFLAAKNLSDAILLSDILRVNTEITKAPLSASMIKRYDEHHQDLTLLK
ALVRQQLPEKYKEIFFDQSKNGYAGYIDGGASQEEFYKFIKPILEKMDGTEELLVKLNREDLLRKQRT
FDNGSIPHQIHLGELHAILRRQEDFYPFLKDNREKIEKILTFRIPYYVGPLARGNSRFAWMTRKSEET
ITPWNFEEVVDKGASAQSFIERMTNFDKNLPNEKVLPKHSLLYEYFTVYNELTKVKYVTEGMRKPAFL
SGEQKKAIVDLLFKTNRKVTVKQLKEDYFKKIECFDSVEISGVEDRFNASLGTYHDLLKIIKDKDFLD
NEENEDILEDIVLTLTLFEDREMIEERLKTYAHLFDDKVMKQLKRRRYTGWGRLSRKLINGIRDKQSG
KTILDFLKSDGFANRNFMQLIHDDSLTFKEDIQKAQVSGQGDSLHEHIANLAGSPAIKKGILQTVKVV
DELVKVMGRHKPENIVIEMARENQTTQKGQKNSRERMKRIEEGIKELGSQILKEHPVENTQLQNEKLY
LYYLQNGRDMYVDQELDINRLSDYDVDHIVPQSFLKDDSIDNKVLTRSDKNRGKSDNVPSEEVVKKMK
NYWRQLLNAKLITQRKFDNLTKAERGGLSELDKAGFIKRQLVETRQITKHVAQILDSRMNTKYDENDK
LIREVKVITLKSKLVSDFRKDFQFYKVREINNYHHAHDAYLNAVVGTALIKKYPKLESEFVYGDYKVY
DVRKMIAKSEQEIGKATAKYFFYSNIMNFFKTEITLANGEIRKRPLIETNGETGEIVWDKGRDFATVR
KVLSMPQVNIVKKTEVQTGGFSKESILPKRNSDKLIARKKDWDPKKYGGFDSPTVAYSVLVVAKVEKG
KSKKLKSVKELLGITIMERSSFEKNPIDFLEAKGYKEVKKDLIIKLPKYSLFELENGRKRMLASAGEL
QKGNELALPSKYVNFLYLASHYEKLKGS
CPEKM
(SEQ ID NO: 16)
KPIREQAENIIHLFTLTNLGAPAAFKYFDTTIDRKRYTSTKEVLDATLIHQSITGLYETRIDLSQLGG
DGGSGGSGGSGGSGGSGGSGGDKKYSIGLAIGTNSVGWAVITDEYKVPSKKFKVLGNTDRHSIKKNLI
GALLFDSGETAEATRLKRTARRRYTRRKNRICYLQEIFSNEMAKVDDSFFHRLEESFLVEEDKKHERH
PIFGNIVDEVAYHEKYPTIYHLRKKLVDSTDKADLRLIYLALAHMIKFRGHFLIEGDLNPDNSDVDKL
FIQLVQTYNQLFEENPINASGVDAKAILSARLSKSRRLENLIAQLPGEKKNGLFGNLIALSLGLTPNF
KSNFDLAEDAKLQLSKDTYDDDLDNLLAQIGDQYADLFLAAKNLSDAILLSDILRVNTEITKAPLSAS
MIKRYDEHHQDLTLLKALVRQQLPEKYKEIFFDQSKNGYAGYIDGGASQEEFYKFIKPILEKMDGTEE
LLVKLNREDLLRKQRTFDNGSIPHQIHLGELHAILRRQEDFYPFLKDNREKIEKILTFRIPYYVGPLA
RGNSRFAWMTRKSEETITPWNFEEVVDKGASAQSFIERMTNFDKNLPNEKVLPKHSLLYEYFTVYNEL
TKVKYVTEGMRKPAFLSGEQKKAIVDLLFKTNRKVTVKQLKEDYFKKIECFDSVEISGVEDRFNASLG
TYHDLLKIIKDKDFLDNEENEDILEDIVLTLTLFEDREMIEERLKTYAHLFDDKVMKQLKRRRYTGWG
RLSRKLINGIRDKQSGKTILDFLKSDGFANRNFMQLIHDDSLTFKEDIQKAQVSGQGDSLHEHIANLA
GSPAIKKGILQTVKVVDELVKVMGRHKPENIVIEMARENQTTQKGQKNSRERMKRIEEGIKELGSQIL
KEHPVENTQLQNEKLYLYYLQNGRDMYVDQELDINRLSDYDVDHIVPQSFLKDDSIDNKVLTRSDKNR
GKSDNVPSEEVVKKMKNYWRQLLNAKLITQRKFDNLTKAERGGLSELDKAGFIKRQLVETRQITKHVA
QILDSRMNTKYDENDKLIREVKVITLKSKLVSDFRKDFQFYKVREINNYHHAHDAYLNAVVGTALIKK
YPKLESEFVYGDYKVYDVRKMIAKSEQEIGKATAKYFFYSNIMNFFKTEITLANGEIRKRPLIETNGE
TGEIVWDKGRDFATVRKVLSMPQVNIVKKTEVQTGGFSKESILPKRNSDKLIARKKDWDPKKYGGFDS
PTVAYSVLVVAKVEKGKSKKLKSVKELLGITIMERSSFEKNPIDFLEAKGYKEVKKDLIIKLPKYSLF
ELENGRKRMLASAGELQKGNELALPSKYVNFLYLASHYEKLKGSPEDNEQKQLFVEQHKHYLDEIIEQ
ISEFSKRVILADANLDKVLSAYNKHRD

[0145] Exemplary C-terminal fragments of Cas9, based on the Cas9 of SEQ ID NO: 6, which may be rearranged to an N-terminus of Cas9, are provided below. It should be appreciated that such C-terminal fragments of Cas9 are exemplary and are not meant to be limiting.

CP1012
(SEQ ID NO: 17)
DYKVYDVRKMIAKSEQEIGKATAKYFFYSNIMNFFKTEITLANGEIRKR
PLIETNGETGEIVWDKGRDFATVRKVLSMPQVNIVKKTEVQTGGFSKES
ILPKRNSDKLIARKKDWDPKKYGGFDSPTVAYSVLVVAKVEKGKSKKLK
SVKELLGITIMERSSFEKNPIDFLEAKGYKEVKKDLIIKLPKYSLFELE
NGRKRMLASAGELQKGNELALPSKYVNFLYLASHYEKLKGSPEDNEQKQ
LFVEQHKHYLDEIIEQISEFSKRVILADANLDKVLSAYNKHRDKPIREQ
AENIIHLFTLTNLGAPAAFKYFDTTIDRKRYTSTKEVLDATLIHQSITG
LYETRIDLSQLGGD.
CPBM
(SEQ ID NO: 18)
EIGKATAKYFFYSNIMNFFKTEITLANGEIRKRPLIETNGETGEIVWDK
GRDFATVRKVLSMPQVNIVKKTEVQTGGFSKESILPKRNSDKLIARKKD
WDPKKYGGFDSPTVAYSVLVVAKVEKGKSKKLKSVKELLGITIMERSSF
EKNPIDFLEAKGYKEVKKDLIIKLPKYSLFELENGRKRMLASAGELQKG
NELALPSKYVNFLYLASHYEKLKGSPEDNEQKQLFVEQHKHYLDEIIEQ
ISEFSKRVILADANLDKVLSAYNKHRDKPIREQAENIIHLFTLTNLGAP
AAFKYFDTTIDRKRYTSTKEVLDATLIHQSITGLYETRIDLSQLGGD.
CP1041
(SEQ ID NO: 19)
NIMNFFKTEITLANGEIRKRPLIETNGETGEIVWDKGRDFATVRKVLSM
PQVNIVKKTEVQTGGFSKESILPKRNSDKLIARKKDWDPKKYGGFDSPT
VAYSVLVVAKVEKGKSKKLKSVKELLGITIMERSSFEKNPIDFLEAKGY
KEVKKDLIIKLPKYSLFELENGRKRMLASAGELQKGNELALPSKYVNFL
YLASHYEKLKGSPEDNEQKQLFVEQHKHYLDEIIEQISEFSKRVILADA
NLDKVLSAYNKHRDKPIREQAENIIHLFTLTNLGAPAAFKYFDTTIDRK
RYTSTKEVLDATLIHQSITGLYETRIDLSQLGGD.
CP1249
(SEQ ID NO: 20)
PEDNEQKQLFVEQHKHYLDEIIEQISEFSKRVILADANLDKVLSAYNKH
RDKPIREQAENIIHLFTLTNLGAPAAFKYFDTTIDRKRYTSTKEVLDAT
LIHQSITGLYETRIDLSQLGGD.
CP1300
(SEQ ID NO: 21)
KPIREQAENIIHLFTLTNLGAPAAFKYFDTTIDRKRYTSTKEVLDATLI
HQSITGLYETRIDLSQLGGD.

### Cas9 Domains

[0146] Some aspects of this disclosure provide Cas9 proteins that exhibit activity on a target sequence that does not comprise the canonical PAM (5′-NGG-3′, where N is A, C, G, or T) at its 3′-end. In some embodiments, the Cas9 protein exhibits activity on a target sequence comprising a 5′-NGG-3′ PAM sequence at its 3′-end. In some embodiments, the Cas9 protein exhibits activity on a target sequence comprising a 5′-NNG-3′ PAM sequence at its 3′-end. In some embodiments, the Cas9 protein exhibits activity on a target sequence comprising a 5′-NNA-3′ PAM sequence at its 3′-end. In some embodiments, the Cas9 protein exhibits activity on a target sequence comprising a 5′-NNC-3′ PAM sequence at its 3′-end. In some embodiments, the Cas9 protein exhibits activity on a target sequence comprising a 5′-NNT-3′ PAM sequence at its 3′-end. In some embodiments, the Cas9 protein exhibits activity on a target sequence comprising a 5′-NGT-3′ PAM sequence at its 3′-end. In some embodiments, the Cas9 protein exhibits activity on a target sequence comprising a 5′-NGA-3′ PAM sequence at its 3′-end. In some embodiments, the Cas9 protein exhibits activity on a target sequence comprising a 5′-NGC-3′ PAM sequence at its 3′-end. In some embodiments, the Cas9 protein exhibits activity on a target sequence comprising a 5′-NAA-3′ PAM sequence at its 3′-end. In some embodiments, the Cas9 protein exhibits activity on a target sequence comprising a 5′-NAC-3′ PAM sequence at its 3′-end. In some embodiments, the Cas9 protein exhibits activity on a target sequence comprising a 5′-NAT-3′ PAM sequence at its 3′-end. In still other embodiments, the Cas9 protein exhibits activity on a target sequence comprising a 5′-NAG-3′ PAM sequence at its 3′-end.

[0147] It should be appreciated that any of the amino acid mutations described herein, (e.g., A262T) from a first amino acid residue (e.g., A) to a second amino acid residue (e.g., T) may also include mutations from the first amino acid residue to an amino acid residue that is similar to (e.g., conserved) the second amino acid residue. For example, mutation of an amino acid with a hydrophobic side chain (e.g., alanine, valine, isoleucine, leucine, methionine, phenylalanine, tyrosine, or tryptophan) may be a mutation to a second amino acid with a different hydrophobic side chain (e.g., alanine, valine, isoleucine, leucine, methionine, phenylalanine, tyrosine, or tryptophan). For example, a mutation of an alanine to a threonine (e.g., a A262T mutation) may also be a mutation from an alanine to an amino acid that is similar in size and chemical properties to a threonine, for example, serine. As another example, mutation of an amino acid with a positively charged side chain (e.g., arginine, histidine, or lysine) may be a mutation to a second amino acid with a different positively charged side chain (e.g., arginine, histidine, or lysine). As another example, mutation of an amino acid with a polar side chain (e.g., serine, threonine, asparagine, or glutamine) may be a mutation to a second amino acid with a different polar side chain (e.g., serine, threonine, asparagine, or glutamine). Additional similar amino acid pairs include, but are not limited to, the following: phenylalanine and tyrosine; asparagine and glutamine; methionine and cysteine; aspartic acid and glutamic acid; and arginine and lysine. The skilled artisan would recognize that such conservative amino acid substitutions will likely have minor effects on protein structure and are likely to be well tolerated without compromising function. In some embodiments, any amino of the amino acid mutations provided herein from one amino acid to a threonine may be an amino acid mutation to a serine. In some embodiments, any amino of the amino acid mutations provided herein from one amino acid to an arginine may be an amino acid mutation to a lysine. In some embodiments, any amino of the amino acid mutations provided herein from one amino acid to an isoleucine, may be an amino acid mutation to an alanine, valine, methionine, or leucine. In some embodiments, any amino of the amino acid mutations provided herein from one amino acid to a lysine may be an amino acid mutation to an arginine. In some embodiments, any amino of the amino acid mutations provided herein from one amino acid to an aspartic acid may be an amino acid mutation to a glutamic acid or asparagine. In some embodiments, any amino of the amino acid mutations provided herein from one amino acid to a valine may be an amino acid mutation to an alanine, isoleucine, methionine, or leucine. In some embodiments, any amino of the amino acid mutations provided herein from one amino acid to a glycine may be an amino acid mutation to an alanine. It should be appreciated, however, that additional conserved amino acid residues would be recognized by the skilled artisan and any of the amino acid mutations to other conserved amino acid residues are also within the scope of this disclosure.

### Mutations in Wild-Type SpCas9

[0148] Some aspects of this disclosure provide a Cas9 protein comprising an amino acid sequence that is at least 80% identical to the amino acid sequence of Cas9 as provided by any of the sequences set forth in SEQ ID NO: 2, 4, or 6-11, wherein the amino acid sequence of the Cas9 protein comprises at least one mutation in an amino acid residue selected from the group consisting of amino acid residues 10, 177, 218, 322, 367, 409, 427, 589, 599, 614, 630, 631, 654, 673, 693, 710, 715, 727, 743, 753, 757, 758, 762, 763, 768, 803, 859, 861, 865, 869, 921, 946, 1016, 1021, 1028, 1054, 1077, 1080, 1114, 1134, 1135, 1137, 1139, 1151, 1180, 1188, 1211, 1219, 1221, 1223, 1256, 1264, 1274, 1290, 1318, 1317, 1320, 1323, and 1333 of S. pyogenes having the amino acid sequence provided in SEQ ID NO: 2, or in a corresponding amino acid residue in any of the amino acid sequences provided in SEQ ID NO: 2. In some embodiments, the Cas9 protein comprises a RuvC and an HNH domain. In some embodiments, the amino acid sequence of the Cas9 protein is not identical to the amino acid sequence of a naturally occurring Cas9 domain. In some embodiments, the Cas9 protein is a nuclease-inactive Cas9 protein. In some embodiments, the Cas9 domain is a Cas9 nickase. In some embodiments, the amino acid sequence of the Cas9 protein comprises at least one mutation selected from the group consisting of X10T, X177N, X218R, X322V, X367T, X409I, X427G, X589S, X599R, X614N, X630K, X631A, X654L, X673E, X693L, X710E, X715C, X727I, X743I, X753G, X757K, X758H, X762G, X763I, X768H, X803S, X859S, X861N, X865G, X869S, X921P, X946D, X1016D, X1021T, X1028D, X1054D, X1077D, X1080S, X1114G, X1134L, X1135N, X1137S, X1139A, X1151E, X1180G, X1188R, X1211R, X1219V, X1221H, X1223S, X1256R, X1264Y, X1274R, X1290G, X1318S, X1317T, X1320V, X1323D, and X1333K of the amino acid sequence provided in SEQ ID NO: 2, or in a corresponding mutation, or mutations, in any of the amino acid sequences provided in SEQ ID NO: 2, wherein X represents any amino acid. In some embodiments, the amino acid sequence of the Cas9 protein comprises at least one mutation selected from group consisting of A10T, D177N, K218R, 1322V, A367T, S409I, E427G, A589S, K599R, D614N, E630K, M631A, R654L, K673E, F693L, K710E, G715C, L727I, V743I, R753G, E757K, N758H, E762G, M763I, Q768H, N803S, R859S, D861N, G865G, N869S, L921P, N946D, Y1016D, M1021T, E1028D, V1139A, N1054D, G1077D, F1080S, R1114G, F1134L, D1135N, P1137S, K1151E, D1180G, K1188R, K1211R, E1219V, Q1221H, G1223S, Q1256R, H1264Y, S1274R, V1290G, L1318S, N1317T, A1320V, A1323D, and R1333K of the amino acid sequence provided in SEQ ID NO: 2, or in a corresponding mutation, or mutations, in any of the amino acid sequences provided in SEQ ID NO: 2, 4, or 6-11, wherein X represents any amino acid.

[0149] Some aspects of this disclosure provide a Cas9 protein comprising an amino acid sequence that is at least 80% identical to the amino acid sequence of Cas9 as provided by SEQ ID NO: 2, wherein the amino acid sequence of the Cas9 protein comprises at least one mutation in an amino acid residue selected from the group consisting of amino acid residues 472, 562, 565, 570, 589, 608, 625, 627, 629, 630, 631, 638, 647, 652, 653, 654, 670, 673, 676, 687, 703, 710, 711, 716, 740, 742, 752, 753, 767, 771, 775, 789, 790, 795, 797, 803, 804, 808, 848, 866, 875, 890, 922, 928, 948, 959, 990, 995, 1014, 1015, 1016, 1021, 1030, 1036, 1055, 1057, 1114, 1127, 1135, 1156, 1177, 1180, 1184, 1207, 1219, 1234, 1246, 1251, 1252, 1286, 1301, 1332, 1335, 1337, 1338, 1348, 1349, 1365, 1367, and 1368 of S. pyogenes having the amino acid sequence provided in SEQ ID NO: 2, or in a corresponding amino acid residue in any of the amino acid sequences provided in SEQ ID NO: 2, 4, or 6-11. In some embodiments, the Cas9 protein comprises a RuvC and an HNH domain.

[0150] In some embodiments, the amino acid sequence of the Cas9 protein is not identical to the amino acid sequence of a naturally occurring Cas9 protein. In some embodiments, the Cas9 protein is a nuclease-inactive Cas9 protein. In some embodiments, the Cas9 protein is a Cas9 nickase. In some embodiments, the amino acid sequence of the Cas9 protein comprises at least one mutation selected from the group consisting of X472I, X562F, X565D, X570T, X570S, X589V, X608R, X625S, X627K, X629G, X630G, X631I, X638P, X647A, X647I, X652T, X653K, X654L, X654I, X654H, X670T, X673E, X676G, X687R, X703P, X710E, X711T, X716R, X740A, X742E, X752R, X753G, X767D, X771H, X775R, X789E, X790A, X795L, X797N, X803S, X804A, X808D, X848N, X866R, X875I, X890E, X890N, X922A, X928T, X948E, X959N, X990S, X995S, X1014N, X1015A, X1016C, X1016S, X1021L, X1030R, X1036H, X1036D, X1055E, X1057S, X1057T, X1114G, X1127A, X1135N, X1156E, X1156N, X1177S, X1180E, X1184T, X1207G, X1219V, X1234D, X1246E, X1251G, X1252D, X1286H, X1301S, X1332N, X1332G, X1335Q, X1337N, X1338T, X1348V, X1349R, X1365L, X1367E, X1367T, X1367fs?, and X1368D of the amino acid sequence provided in SEQ ID NO: 2, or in a corresponding mutation, or mutations, in any of the amino acid sequences provided in SEQ ID NOs: 2, 4, or 6-11, wherein X represents any amino acid. In some embodiments, the amino acid sequence of the Cas9 protein comprises at least one mutation selected from group consisting of T472I, I562F, V565D, I570T, I570S, A589V, K608R, L625S, E627K, R629G, E630G, M631I, T638P, V647A, V647I, K652T, R653K, R654L, R654I, R654H, I670T, K673E, G676G, G687R, T703P, K710E, A711T, Q716R, T740A, K742E, G752R, R753G, N767D, Q771H, K775R, K789E, E790A, I795L, K797N, N803S, T804A, N808D, K848N, K866R, V875I, K890E, K890N, V922A, K948E, K959N, N990S, T995S, K1014N, V1015A, Y1016C, Y1016S, M1021L, G1030R, Y1036H, Y1036D, 11055E, 11057S, 11057T, R1114G, D1127A, D1135N, K1156E, K1156N, N1177S, D1180E, A1184T, E1207G, E1219V, N1234D, K1246E, D1251G, N1252D, N1286H, P1301S, D1332N, D1332G, R1335Q, T1337N, S1338T, 11348V, H1349R, L1365L, G1367E, G1367T, and D1368D of the amino acid sequence provided in SEQ ID NO: 2, or in a corresponding mutation, or mutations, in SEQ ID NO: 2, 4, or 6-11, wherein X represents any amino acid.

[0151] Some aspects of this disclosure provide a Cas9 protein comprising an amino acid sequence that is at least 80% identical to the amino acid sequence of Cas9 as provided by SEQ ID NOs: 2, wherein the amino acid sequence of the Cas9 protein comprises at least one mutation in an amino acid residue selected from the group consisting of amino acid residues 575, 596, 631, 649, 654, 664, 710, 740, 743, 748, 750, 753, 765, 790, 797, 853, 922, 955, 961, 985, 1012, 1049, 1057, 1114, 1131, 1135, 1150, 1156, 1162, 1180, 1191, 1218, 1219, 1221, 1227, 1249, 1253, 1256, 1286, 1293, 1308, 1317, 1320, 1321, 1332, 1335, and 1339 of S. pyogenes having the amino acid sequence provided in SEQ ID NO: 2, or in a corresponding amino acid residue in another Cas9 sequence (e.g., any of the sequences of 2, 4, or 6-11). In some embodiments, the Cas9 protein comprises a RuvC and an HNH domain. In some embodiments, the amino acid sequence of the Cas9 protein is not identical to the amino acid sequence of a naturally occurring Cas9 protein. In some embodiments, the Cas9 protein is a nuclease-inactive Cas9 domain. In some embodiments, the Cas9 protein is a Cas9 nickase. In some embodiments, the amino acid sequence of the Cas9 protein comprises at least one mutation selected from the group consisting of X575S, X596Y, X631L, X649R, X654L, X664K, X710E, X740A, X743I, X748I, X750A, X753G, X765X, X790A, X797E, X853E, X922A, X955L, X961E, X985Y, X1012A, X1049G, X1057V, X1114G, X1131C, X1135N, X1150V, X1156E, X1162A, X1180G, X1180A, X1191N, X1218S, X1219V, X1221H, X1227V, X1249S, X1253K, X1256R, X1286K, X1293T, X1308D, X1317K, X1320V, X1321S, X1332G, X1335L, and X1339I of the amino acid sequence provided in SEQ ID NO: 2, or in a corresponding mutation, or mutations, in another Cas9 sequence (e.g., any of the sequences of SEQ ID NOs: 2, 4, or 6-11), wherein X represents any amino acid. In some embodiments, the amino acid sequence of the Cas9 protein comprises at least one mutation selected from group consisting of F575S, D596Y, M631L, K649R, R654L, R664K, K710E, T740A, V743I, V748I, V750A, R753G, R765X, E790A, K797E, D853E, V922A, V955L, K961E, H985Y, D1012A, E1049G, 11057V, R1114G, Y1131C, D1135N, E1150V, K1156E, E1162A, D1180G, D1180A, K1191N, G1218S, E1219V, Q1221H, A1227V, P1249S, E1253K, Q1256R, N1286K, A1293T, N1308D, N1317K, A1320V, P1321S, D1332G, R1335L, and T1339I of the amino acid sequence provided in SEQ ID NO: 2, or in a corresponding mutation, or mutations, in another Cas9 sequence (e.g., any of the sequences of SEQ ID NOs: 2, 4, or 6-11), wherein X represents any amino acid.

[0152] In some embodiments, the amino acid sequence of the Cas9 protein comprises at least one, at least two, at least three, at least four, at least five, at least six, at least seven, at least eight, at least nine, at least ten, at least eleven, at least twelve, at least thirteen, at least fourteen, at least fifteen, at least sixteen, at least seventeen, at least eighteen, at least nineteen, at least twenty, at least twenty-one, at least twenty-two, at least twenty-three, at least twenty-four, at least twenty-five, at least twenty-six, at least twenty-seven, at least twenty-eight, at least twenty-nine, at least thirty, at least thirty-one, at least thirty-two, at least thirty-three, at least thirty-four, at least thirty-five, at least thirty-six, at least thirty-seven, at least thirty-eight, at least thirty-nine, at least forty, at least forty-one, at least forty-two, at least forty-three, at least forty-four, at least forty-five, at least forty-six, at least forty-seven, at least forty-eight, at least forty-nine, at least fifty, at least fifty-one, at least fifty-two, at least fifty-three, at least fifty-four, at least fifty-five, at least fifty-six, at least fifty-seven, at least fifty-eight, or at least fifty-nine mutations in amino acid residues selected from the group consisting of 10, 177, 218, 322, 367, 409, 427, 589, 599, 614, 630, 631, 654, 673, 693, 710, 715, 727, 743, 753, 757, 758, 762, 763, 768, 803, 859, 861, 865, 869, 921, 946, 1016, 1021, 1028, 1054, 1077, 1080, 1114, 1134, 1135, 1137, 1139, 1151, 1180, 1188, 1211, 1219, 1221, 1223, 1256, 1264, 1274, 1290, 1318, 1317, 1320, 1323, and 1333 of the amino acid sequence provided in SEQ ID NO: 2, or in a corresponding mutation, or mutations, in another Cas9 sequence (e.g., any of the sequences of SEQ ID NOs: 2, 4, or 6-11), wherein X represents any amino acid.

[0153] In some embodiments, the amino acid sequence of the Cas9 protein comprises at least one, at least two, at least three, at least four, at least five, at least six, at least seven, at least eight, at least nine, at least ten, at least eleven, at least twelve, at least thirteen, at least fourteen, at least fifteen, at least sixteen, at least seventeen, at least eighteen, at least nineteen, at least twenty, at least twenty-one, at least twenty-two, at least twenty-three, at least twenty-four, at least twenty-five, at least twenty-six, at least twenty-seven, at least twenty-eight, at least twenty-nine, at least thirty, at least thirty-one, at least thirty-two, at least thirty-three, at least thirty-four, at least thirty-five, at least thirty-six, at least thirty-seven, at least thirty-eight, at least thirty-nine, at least forty, at least forty-one, at least forty-two, at least forty-three, at least forty-four, at least forty-five, at least forty-six, at least forty-seven, at least forty-eight, at least forty-nine, at least fifty, at least fifty-one, at least fifty-two, at least fifty-three, at least fifty-four, at least fifty-five, at least fifty-six, at least fifty-seven, at least fifty-eight, or at least fifty-nine mutations selected from the group consisting of X10T, X177N, X218R, X322V, X367T, X409I, X427G, X589S, X599R, X614N, X630K, X631A, X654L, X673E, X693L, X710E, X715C, X727I, X743I, X753G, X757K, X758H, X762G, X763I, X768H, X803S, X859S, X861N, X865G, X869S, X921P, X946D, X1016D, X1021T, X1028D, X1054D, X1077D, X1080S, X1114G, X1134L, X1135N, X1137S, X1139A, X1151E, X1180G, X1188R, X1211R, X1219V, X1221H, X1223S, X1256R, X1264Y, X1274R, X1290G, X1318S, X1317T, X1320V, X1323D, and X1333K of the amino acid sequence provided in SEQ ID NO: 2, or in a corresponding mutation, or mutations, in another Cas9 sequence (e.g., any of the sequences of SEQ ID NOs: 2, 4, or 6-11), wherein X represents any amino acid.

[0154] In some embodiments, the present disclosure may utilize any of the Cas9 variants disclosed in the SEQUENCES section herein.

[0155] In some embodiments, the amino acid sequence of the Cas9 protein comprises at least one, at least two, at least three, at least four, at least five, at least six, at least seven, at least eight, at least nine, at least ten, at least eleven, at least twelve, at least thirteen, at least fourteen, at least fifteen, at least sixteen, at least seventeen, at least eighteen, at least nineteen, at least twenty, at least twenty-one, at least twenty-two, at least twenty-three, at least twenty-four, at least twenty-five, at least twenty-six, at least twenty-seven, at least twenty-eight, at least twenty-nine, at least thirty, at least thirty-one, at least thirty-two, at least thirty-three, at least thirty-four, at least thirty-five, at least thirty-six, at least thirty-seven, at least thirty-eight, at least thirty-nine, at least forty, at least forty-one, at least forty-two, at least forty-three, at least forty-four, at least forty-five, at least forty-six, at least forty-seven, at least forty-eight, at least forty-nine, at least fifty, at least fifty-one, at least fifty-two, at least fifty-three, at least fifty-four, at least fifty-five, at least fifty-six, at least fifty-seven, at least fifty-eight, or at least fifty-nine mutations selected from the group consisting of A10T, D177N, K218R, I322V, A367T, S409I, E427G, A589S, K599R, D614N, E630K, M631A, R654L, K673E, F693L, K710E, G715C, L727I, V743I, R753G, E757K, N758H, E762G, M763I, Q768H, N803S, R859S, D861N, G865G, N869S, L921P, N946D, Y1016D, M1021T, E1028D, N1054D, G1077D, F1080S, R1114G, F1134L, D1135N, P1137S, V1139A, K1151E, D1180G, K1188R, K1211R, E1219V, Q1221H, G1223S, Q1256R, H1264Y, S1274R, V1290G, L1318S, N1317T, A1320V, A1323D, and R1333K of the amino acid sequence provided in SEQ ID NO: 2, or in a corresponding mutation, or mutations, in another Cas9 sequence (e.g., any of the sequences of SEQ ID NOs: 2, 4, or 6-11), wherein X represents any amino acid.

[0156] In some embodiments, the amino acid sequence of the Cas9 protein comprises at least one, at least two, at least three, at least four, at least five, at least six, at least seven, at least eight, at least nine, at least ten, at least eleven, at least twelve, at least thirteen, at least fourteen, at least fifteen, at least sixteen, at least seventeen, at least eighteen, at least nineteen, at least twenty, at least twenty-one, at least twenty-two, at least twenty-three, at least twenty-four, at least twenty-five, at least twenty-six, at least twenty-seven, at least twenty-eight, at least twenty-nine, at least thirty, at least thirty-one, at least thirty-two, at least thirty-three, at least thirty-four, at least thirty-five, at least thirty-six, at least thirty-seven, at least thirty-eight, at least thirty-nine, at least forty, at least forty-one, at least forty-two, at least forty-three, at least forty-four, at least forty-five, at least forty-six, at least forty-seven, or at least forty-eight mutations selected from the group consisting of 10, 177, 218, 322, 367, 427, 589, 599, 614, 630, 631, 693, 710, 743, 753, 757, 758, 762, 768, 803, 859, 861, 865, 869, 921, 946, 1016, 1021, 1028, 1054, 1077, 1080, 1114, 1134, 1135, 1137, 1151, 1180, 1188, 1211, 1221, 1223, 1274, 1290, 1317, 1320, 1323, and 1333 of the amino acid sequence provided in SEQ ID NO: 2, or in a corresponding mutation, or mutations, in another Cas9 sequence (e.g., any of the sequences of SEQ ID NOs: 2, 4, or 6-11), wherein X represents any amino acid.

[0157] In some embodiments, the amino acid sequence of the Cas9 protein comprises at least one, at least two, at least three, at least four, at least five, at least six, at least seven, at least eight, at least nine, at least ten, at least eleven, at least twelve, at least thirteen, at least fourteen, at least fifteen, at least sixteen, at least seventeen, at least eighteen, at least nineteen, at least twenty, at least twenty-one, at least twenty-two, at least twenty-three, at least twenty-four, at least twenty-five, at least twenty-six, at least twenty-seven, at least twenty-eight, at least twenty-nine, at least thirty, at least thirty-one, at least thirty-two, at least thirty-three, at least thirty-four, at least thirty-five, at least thirty-six, at least thirty-seven, at least thirty-eight, at least thirty-nine, at least forty, at least forty-one, at least forty-two, at least forty-three, at least forty-four, at least forty-five, at least forty-six, at least forty-seven, or at least forty-eight mutations selected from the group consisting of X10T, X177N, X218R, X322V, X367T, X427G, X589S, X599R, X614N, X630K, X631A, X693L, X710E, X743I, X753G, X757K, X758H, X762G, X768H, X803S, X859S, X861N, X865G, X869S, X921P, X946D, X1016D, X1021T, X1028D, X1054D, X1077D, X1080S, X1114G, X1134L, X1135N, X1137S, X1151E, X1180G, X1188R, X1211R, X1221H, X1223S, X1274R, X1290G, X1317T, X1320V, X1323D, and X1333K of the amino acid sequence provided in SEQ ID NO: 2, or in a corresponding mutation, or mutations, in another Cas9 sequence (e.g., any of the sequences of SEQ ID NOs: 2, 4, or 6-11), wherein X represents any amino acid.

[0158] In some embodiments, the amino acid sequence of the Cas9 protein comprises at least one, at least two, at least three, at least four, at least five, at least six, at least seven, at least eight, at least nine, at least ten, at least eleven, at least twelve, at least thirteen, at least fourteen, at least fifteen, at least sixteen, at least seventeen, at least eighteen, at least nineteen, at least twenty, at least twenty-one, at least twenty-two, at least twenty-three, at least twenty-four, at least twenty-five, at least twenty-six, at least twenty-seven, at least twenty-eight, at least twenty-nine, at least thirty, at least thirty-one, at least thirty-two, at least thirty-three, at least thirty-four, at least thirty-five, at least thirty-six, at least thirty-seven, at least thirty-eight, at least thirty-nine, at least forty, at least forty-one, at least forty-two, at least forty-three, at least forty-four, at least forty-five, at least forty-six, at least forty-seven, or at least forty-eight mutations selected from the group consisting of A10T, D177N, K218R, I322V, A367T, E427G, A589S, K599R, D614N, E630K, M631A, F693L, K710E, V743I, R753G, E757K, N758H, E762G, Q768H, N803S, R859S, D861N, N869S, L921P, N946D, Y1016D, M1021T, Q1028D, N1054D, G1077D, F1080S, R1114G, F1134L, D1135N, P1137S, K1151E, D1180G, K1188R, K1211R, Q1221H, G1223S, S1274R, V1290G, N1317T, A1320V, A1323D, and R1333K of the amino acid sequence provided in SEQ ID NO: 2, or in a corresponding mutation, or mutations, in another Cas9 sequence (e.g., any of the sequences of SEQ ID NOs: 2, 4, or 6-11), wherein X represents any amino acid.

[0159] In some embodiments, the amino acid sequence of the Cas9 protein comprises at least one, at least two, at least three, at least four, at least five, at least six, at least seven, at least eight, at least nine, at least ten, at least eleven, at least twelve, at least thirteen, at least fourteen, at least fifteen, at least sixteen, at least seventeen, at least eighteen, at least nineteen, at least twenty, at least twenty-one, at least twenty-two, at least twenty-three, at least twenty-four, at least twenty-five, at least twenty-six, at least twenty-seven, at least twenty-eight, at least twenty-nine, at least thirty, at least thirty-one, at least thirty-two, at least thirty-three, at least thirty-four, at least thirty-five, at least thirty-six, at least thirty-seven, at least thirty-eight, at least thirty-nine, at least forty, at least forty-one, at least forty-two, at least forty-three, at least forty-four, at least forty-five, at least forty-six, at least forty-seven, at least forty-eight, at least forty-nine, at least fifty, at least fifty-one, at least fifty-two, at least fifty-three, at least fifty-four, at least fifty-five, at least fifty-six, at least fifty-seven, at least fifty-eight, at least fifty-nine, at least sixty, at least sixty-one, at least sixty-two, at least sixty-three, at least sixty-four, at least sixty-five, at least sixty-six, at least sixty-seven, at least sixty-eight, at least sixty-nine, at least seventy, at least seventy-one, at least seventy-two, at least seventy-three, at least seventy-four, at least seventy-five, at least seventy-six, at least seventy-seven, at least seventy-eight, at least seventy-nine, or at least eighty mutations selected from the group consisting of 472, 562, 565, 570, 589, 608, 625, 627, 629, 630, 631, 638, 647, 647, 652, 653, 654, 670, 673, 676, 687, 703, 710, 711, 716, 740, 742, 752, 753, 767, 771, 775, 789, 790, 795, 797, 803, 804, 808, 848, 866, 875, 890, 922, 928, 948, 959, 990, 995, 1014, 1015, 1016, 1021, 1030, 1036, 1055, 1057, 1114, 1127, 1135, 1156, 1177, 1180, 1184, 1207, 1219, 1234, 1246, 1251, 1252, 1286, 1301, 1332, 1335, 1337, 1338, 1348, 1349, 1365, 1367, and 1368 of the amino acid sequence provided in SEQ ID NO: 2, or in a corresponding mutation, or mutations, in another Cas9 sequence (e.g., any of the sequences of SEQ ID NOs: 2, 4, or 6-11), wherein X represents any amino acid.

[0160] In some embodiments, the amino acid sequence of the Cas9 protein comprises at least one, at least two, at least three, at least four, at least five, at least six, at least seven, at least eight, at least nine, at least ten, at least eleven, at least twelve, at least thirteen, at least fourteen, at least fifteen, at least sixteen, at least seventeen, at least eighteen, at least nineteen, at least twenty, at least twenty-one, at least twenty-two, at least twenty-three, at least twenty-four, at least twenty-five, at least twenty-six, at least twenty-seven, at least twenty-eight, at least twenty-nine, at least thirty, at least thirty-one, at least thirty-two, at least thirty-three, at least thirty-four, at least thirty-five, at least thirty-six, at least thirty-seven, at least thirty-eight, at least thirty-nine, at least forty, at least forty-one, at least forty-two, at least forty-three, at least forty-four, at least forty-five, at least forty-six, at least forty-seven, at least forty-eight, at least forty-nine, at least fifty, at least fifty-one, at least fifty-two, at least fifty-three, at least fifty-four, at least fifty-five, at least fifty-six, at least fifty-seven, at least fifty-eight, at least fifty-nine, at least sixty, at least sixty-one, at least sixty-two, at least sixty-three, at least sixty-four, at least sixty-five, at least sixty-six, at least sixty-seven, at least sixty-eight, at least sixty-nine, at least seventy, at least seventy-one, at least seventy-two, at least seventy-three, at least seventy-four, at least seventy-five, at least seventy-six, at least seventy-seven, at least seventy-eight, at least seventy-nine, or at least eighty mutations selected from the group consisting of X472I, X562F, X565D, X570T, X570S, X589V, X608R, X625S, X627K, X629G, X630G, X631I, X638P, X647A, X647I, X652T, X653K, X654L, X654I, X654H, X670T, X673E, X676G, X687R, X703P, X710E, X711T, X716R, X740A, X742E, X752R, X753G, X767D, X771H, X775R, X789E, X790A, X795L, X797N, X803S, X804A, X808D, X848N, X866R, X875I, X890E, X890N, X922A, X928T, X948E, X959N, X990S, X995S, X1014N, X1015A, X1016C, X1016S, X1021L, X1030R, X1036H, X1036D, X1055E, X1057S, X1057T, X1114G, X1127A, X1135N, X1156E, X1156N, X1177S, X1180E, X1184T, X1207G, X1219V, X1234D, X1246E, X1251G, X1252D, X1286H, X1301S, X1332N, X1332G, X1335Q, X1337N, X1338T, X1348V, X1349R, X1365L, X1367E, X1367T, X1367fs?, and X1368D of the amino acid sequence provided in SEQ ID NO: 2, or in a corresponding mutation, or mutations, in another Cas9 sequence (e.g., any of the sequences of SEQ ID NOs: 2, 4, or 6-11), wherein X represents any amino acid.

[0161] In some embodiments, the amino acid sequence of the Cas9 protein comprises at least one, at least two, at least three, at least four, at least five, at least six, at least seven, at least eight, at least nine, at least ten, at least eleven, at least twelve, at least thirteen, at least fourteen, at least fifteen, at least sixteen, at least seventeen, at least eighteen, at least nineteen, at least twenty, at least twenty-one, at least twenty-two, at least twenty-three, at least twenty-four, at least twenty-five, at least twenty-six, at least twenty-seven, at least twenty-eight, at least twenty-nine, at least thirty, at least thirty-one, at least thirty-two, at least thirty-three, at least thirty-four, at least thirty-five, at least thirty-six, at least thirty-seven, at least thirty-eight, at least thirty-nine, at least forty, at least forty-one, at least forty-two, at least forty-three, at least forty-four, at least forty-five, at least forty-six, at least forty-seven, at least forty-eight, at least forty-nine, at least fifty, at least fifty-one, at least fifty-two, at least fifty-three, at least fifty-four, at least fifty-five, at least fifty-six, at least fifty-seven, at least fifty-eight, at least fifty-nine, at least sixty, at least sixty-one, at least sixty-two, at least sixty-three, at least sixty-four, at least sixty-five, at least sixty-six, at least sixty-seven, at least sixty-eight, at least sixty-nine, at least seventy, at least seventy-one, at least seventy-two, at least seventy-three, at least seventy-four, at least seventy-five, at least seventy-six, at least seventy-seven, at least seventy-eight, at least seventy-nine, at least eighty mutations selected from the group consisting of T472I, I562F, V565D, I570T, I570S, A589V, K608R, L625S, E627K, R629G, E630G, M631I, T638P, V647A, V647I, K652T, R653K, R654L, R654I, R654H, 1670T, K673E, G676G, G687R, T703P, K710E, A711T, Q716R, T740A, K742E, G752R, R753G, N767D, Q771H, K775R, K789E, E790A, 1795L, K797N, N803S, T804A, N808D, K848N, K866R, V875I, K890E, K890N, V922A, K948E, K959N, N990S, T995S, K1014N, V1015A, Y1016C, Y1016S, M1021L, G1030R, Y1036H, Y1036D, I1055E, I1057S, I1057T, R1114G, D1127A, D1135N, K1156E, K1156N, N1177S, D1180E, A1184T, E1207G, E1219V, N1234D, K1246E, D1251G, N1252D, N1286H, P1301S, D1332N, D1332G, R1335Q, T1337N, S1338T, I1348V, H1349R, L1365L, G1367E, G1367T, and D1368D of the amino acid sequence provided in SEQ ID NO: 2, or in a corresponding mutation, or mutations, in another Cas9 sequence (e.g., any of the sequences of SEQ ID NOs: 2, 4, or 6-11), wherein X represents any amino acid.

[0162] In some embodiments, the amino acid sequence of the Cas9 protein comprises at least one, at least two, at least three, at least four, at least five, at least six, at least seven, at least eight, at least nine, at least ten, at least eleven, at least twelve, at least thirteen, at least fourteen, at least fifteen, at least sixteen, at least seventeen, at least eighteen, at least nineteen, at least twenty, at least twenty-one, at least twenty-two, at least twenty-three, at least twenty-four, at least twenty-five, at least twenty-six, at least twenty-seven, at least twenty-eight, at least twenty-nine, at least thirty, at least thirty-one, at least thirty-two, at least thirty-three, at least thirty-four, at least thirty-five, at least thirty-six, at least thirty-seven, at least thirty-eight, at least thirty-nine, at least forty, at least forty-one, at least forty-two, at least forty-three, at least forty-four, at least forty-five, at least forty-six, at least forty-seven, at least forty-eight, at least forty-nine, at least fifty, at least fifty-one, at least fifty-two, at least fifty-three, at least fifty-four, at least fifty-five, at least fifty-six, at least fifty-seven, at least fifty-eight, at least fifty-nine, at least sixty, at least sixty-one, at least sixty-two, at least sixty-three, at least sixty-four, at least sixty-five, at least sixty-six, at least sixty-seven, at least sixty-eight, at least sixty-nine, at least seventy, at least seventy-one, or at least seventy-two mutations in amino acid residues selected from the group consisting of 472, 562, 565, 570, 589, 608, 625, 627, 629, 630, 631, 638, 647, 647, 652, 653, 654, 676, 687, 703, 716, 740, 742, 752, 753, 767, 771, 775, 789, 790, 795, 797, 803, 804, 808, 848, 866, 875, 890, 890, 922, 948, 959, 990, 995, 1014, 1015, 1016, 1021, 1030, 1036, 1055, 1057, 1057, 1114, 1127, 1135, 1156, 1177, 1180, 1184, 1234, 1246, 1251, 1252, 1286, 1301, 1332, 1335, 1348, 1367, and 1368 of the amino acid sequence provided in SEQ ID NO: 2, or in a corresponding mutation, or mutations, in another Cas9 sequence (e.g., any of the sequences of SEQ ID NOs: 2, 4, or 6-11), wherein X represents any amino acid.

[0163] In some embodiments, the amino acid sequence of the Cas9 protein comprises at least one, at least two, at least three, at least four, at least five, at least six, at least seven, at least eight, at least nine, at least ten, at least eleven, at least twelve, at least thirteen, at least fourteen, at least fifteen, at least sixteen, at least seventeen, at least eighteen, at least nineteen, at least twenty, at least twenty-one, at least twenty-two, at least twenty-three, at least twenty-four, at least twenty-five, at least twenty-six, at least twenty-seven, at least twenty-eight, at least twenty-nine, at least thirty, at least thirty-one, at least thirty-two, at least thirty-three, at least thirty-four, at least thirty-five, at least thirty-six, at least thirty-seven, at least thirty-eight, at least thirty-nine, at least forty, at least forty-one, at least forty-two, at least forty-three, at least forty-four, at least forty-five, at least forty-six, at least forty-seven, at least forty-eight, at least forty-nine, at least fifty, at least fifty-one, at least fifty-two, at least fifty-three, at least fifty-four, at least fifty-five, at least fifty-six, at least fifty-seven, at least fifty-eight, at least fifty-nine, at least sixty, at least sixty-one, at least sixty-two, at least sixty-three, at least sixty-four, at least sixty-five, at least sixty-six, at least sixty-seven, at least sixty-eight, at least sixty-nine, at least seventy, at least seventy-one, or at least seventy-two mutations selected from the group consisting of X472I, X562F, X565D, X570T, X570S, X589V, X608R, X625S, X627K, X629G, X630G, X631I, X631V, X638P, X647A, X647I, X652T, X653K, X654L, X654I, X654H, X670T, X676G, X687R, X703P, X710E, X716R, X740A, X742E, X752R, X753G, X767D, X771H, X775R, X789E, X790A, X795L, X797N, X803S, X804A, X808D, X848N, X866R, X875I, X890E, X890N, X922A, X948E, X959N, X990S, X995S, X1014N, X1015A, X1016C, X1016S, X1021L, X1030R, X1036H, X1036D, X1055E, X1057S, X1057T, X1114G, X1127A, X1127G, X1135N, X1156E, X1156N, X1177S, X1180E, X1184T, X1234D, X1246E, X1251G, X1252D, X1286H, X1301S, X1332N, X1332G, X1335Q, X1338T, X1348V, X1349R, X1367E, X1367T, X1367fs?, and X1368D of the amino acid sequence provided in SEQ ID NO: 2, or in a corresponding mutation, or mutations, in another Cas9 sequence (e.g., any of the sequences of SEQ ID NOs: 2, 4, or 6-11), wherein X represents any amino acid.

[0164] In some embodiments, the amino acid sequence of the Cas9 protein comprises at least one, at least two, at least three, at least four, at least five, at least six, at least seven, at least eight, at least nine, at least ten, at least eleven, at least twelve, at least thirteen, at least fourteen, at least fifteen, at least sixteen, at least seventeen, at least eighteen, at least nineteen, at least twenty, at least twenty-one, at least twenty-two, at least twenty-three, at least twenty-four, at least twenty-five, at least twenty-six, at least twenty-seven, at least twenty-eight, at least twenty-nine, at least thirty, at least thirty-one, at least thirty-two, at least thirty-three, at least thirty-four, at least thirty-five, at least thirty-six, at least thirty-seven, at least thirty-eight, at least thirty-nine, at least forty, at least forty-one, at least forty-two, at least forty-three, at least forty-four, at least forty-five, at least forty-six, at least forty-seven, at least forty-eight, at least forty-nine, at least fifty, at least fifty-one, at least fifty-two, at least fifty-three, at least fifty-four, at least fifty-five, at least fifty-six, at least fifty-seven, at least fifty-eight, at least fifty-nine, at least sixty, at least sixty-one, at least sixty-two, at least sixty-three, at least sixty-four, at least sixty-five, at least sixty-six, at least sixty-seven, at least sixty-eight, at least sixty-nine, at least seventy, at least seventy-one, or at least seventy-two mutations selected from the group consisting of T472I, I562F, V565D, I570T, I570S, A589V, K608R, L625S, E627K, R629G, E630G, M631I, M631V, T638P, V647A, V647I, K652T, R653K, R654L, R654I, R654H, I670T, G676G, G687R, T703P, K710E, Q716R, T740A, K742E, G752R, R753G, N767D, Q771H, K775R, K789E, E790A, I795L, K797N, N803S, T804A, N808D, K848N, K866R, V875I, K890E, K890N, V922A, K948E, K959N, N990S, T995S, K1014N, V1015A, Y1016C, Y1016S, M1021L, G1030R, Y1036H, Y1036D, 11055E, I1057S, I1057T, R1114G, D1127A, D1127G, D1135N, K1156E, K1156N, N1177S, D1180E, A1184T, N1234D, K1246E, D1251G, N1252D, N1286H, P1301S, D1332N, D1332G, R1335Q, S1338T, 11348V, S1349R, G1367E, G1367T, G1367fs?, and D1368D of the amino acid sequence provided in SEQ ID NO: 2, or in a corresponding mutation, or mutations, in another Cas9 sequence (e.g., any of the sequences of SEQ ID NOs: 2, 4, or 6-11), wherein X represents any amino acid.

[0165] In some embodiments, the amino acid sequence of the Cas9 protein comprises at least one, at least two, at least three, at least four, at least five, at least six, at least seven, at least eight, at least nine, at least ten, at least eleven, at least twelve, at least thirteen, at least fourteen, at least fifteen, at least sixteen, at least seventeen, at least eighteen, at least nineteen, at least twenty, at least twenty-one, at least twenty-two, at least twenty-three, at least twenty-four, at least twenty-five, at least twenty-six, at least twenty-seven, at least twenty-eight, at least twenty-nine, at least thirty, at least thirty-one, at least thirty-two, at least thirty-three, at least thirty-four, at least thirty-five, at least thirty-six, at least thirty-seven, at least thirty-eight, at least thirty-nine, at least forty, at least forty-one, at least forty-two, at least forty-three, at least forty-four, at least forty-five, at least forty-six, at least forty-seven, or at least forty-eight mutations selected from the group consisting of 575, 596, 631, 649, 654, 664, 710, 740, 743, 748, 750, 753, 765, 790, 797, 853, 922, 955, 961, 985, 1012, 1049, 1057, 1114, 1131, 1135, 1150, 1156, 1162, 1180, 1191, 1218, 1219, 1221, 1227, 1249, 1253, 1256, 1286, 1293, 1308, 1317, 1320, 1321, 1332, 1335, and 1339 of the amino acid sequence provided in SEQ ID NO: 2, or in a corresponding mutation, or mutations, in another Cas9 sequence (e.g., any of the sequences of SEQ ID NOs: 2, 4, or 6-11), wherein X represents any amino acid.

[0166] In some embodiments, the amino acid sequence of the Cas9 protein comprises at least one, at least two, at least three, at least four, at least five, at least six, at least seven, at least eight, at least nine, at least ten, at least eleven, at least twelve, at least thirteen, at least fourteen, at least fifteen, at least sixteen, at least seventeen, at least eighteen, at least nineteen, at least twenty, at least twenty-one, at least twenty-two, at least twenty-three, at least twenty-four, at least twenty-five, at least twenty-six, at least twenty-seven, at least twenty-eight, at least twenty-nine, at least thirty, at least thirty-one, at least thirty-two, at least thirty-three, at least thirty-four, at least thirty-five, at least thirty-six, at least thirty-seven, at least thirty-eight, at least thirty-nine, at least forty, at least forty-one, at least forty-two, at least forty-three, at least forty-four, at least forty-five, at least forty-six, at least forty-seven, or at least forty-eight mutations selected from the group consisting of X575S, X596Y, X631L, X649R, X654L, X664K, X710E, X740A, X743I, X748I, X750A, X753G, X765X, X790A, X797E, X853E, X922A, X955L, X961E, X985Y, X1012A, X1049G, X1057V, X1114G, X1131C, X1135N, X1150V, X1156E, X1162A, X1180G, X1180A, X1191N, X1218S, X1219V, X1221H, X1227V, X1249S, X1253K, X1256R, X1286K, X1293T, X1308D, X1317K, X1320V, X1321S, X1332G, X1335L, and X1339I of the amino acid sequence provided in SEQ ID NO: 2, or in a corresponding mutation, or mutations, in another Cas9 sequence (e.g., any of the sequences of SEQ ID NOs: 2, 4, or 6-11), wherein X represents any amino acid.

[0167] In some embodiments, the amino acid sequence of the Cas9 protein comprises at least one, at least two, at least three, at least four, at least five, at least six, at least seven, at least eight, at least nine, at least ten, at least eleven, at least twelve, at least thirteen, at least fourteen, at least fifteen, at least sixteen, at least seventeen, at least eighteen, at least nineteen, at least twenty, at least twenty-one, at least twenty-two, at least twenty-three, at least twenty-four, at least twenty-five, at least twenty-six, at least twenty-seven, at least twenty-eight, at least twenty-nine, at least thirty, at least thirty-one, at least thirty-two, at least thirty-three, at least thirty-four, at least thirty-five, at least thirty-six, at least thirty-seven, at least thirty-eight, at least thirty-nine, at least forty, at least forty-one, at least forty-two, at least forty-three, at least forty-four, at least forty-five, at least forty-six, at least forty-seven, or at least forty-eight mutations selected from the group consisting of F575S, D596Y, M631L, K649R, R654L, R664K, K710E, T740A, V743I, V748I, V750A, R753G, R765X, E790A, K797E, D853E, V922A, V955L, K961E, H985Y, D1012A, E1049G, 11057V, R1114G, Y1131C, D1135N, E1150V, K1156E, E1162A, D1180G, D1180A, K1191N, G1218S, E1219V, Q1221H, A1227V, P1249S, E1253K, Q1256R, N1286K, A1293T, N1308D, N1317K, A1320V, P1321S, D1332G, R1335L, and T1339I of the amino acid sequence provided in SEQ ID NO: 2, or in a corresponding mutation, or mutations, in another Cas9 sequence (e.g., any of the sequences of SEQ ID NOs: 2, 4, or 6-11), wherein X represents any amino acid.

[0168] In some embodiments, the amino acid sequence of the Cas9 protein comprises at least one, at least two, at least three, at least four, at least five, at least six, at least seven, at least eight, at least nine, at least ten, at least eleven, at least twelve, at least thirteen, at least fourteen, at least fifteen, at least sixteen, at least seventeen, at least eighteen, at least nineteen, at least twenty, at least twenty-one, at least twenty-two, at least twenty-three, at least twenty-four, at least twenty-five, at least twenty-six, at least twenty-seven, at least twenty-eight, at least twenty-nine, at least thirty, at least thirty-one, at least thirty-two, at least thirty-three, at least thirty-four, at least thirty-five, at least thirty-six, at least thirty-seven, at least thirty-eight, at least thirty-nine, at least forty, at least forty-one, at least forty-two, or at least forty-three mutations selected from the group consisting of 575, 596, 631, 649, 664, 710, 740, 743, 748, 750, 753, 765, 790, 797, 853, 922, 961, 985, 1012, 1049, 1057, 1114, 1131, 1135, 1150, 1156, 1162, 1180, 1191, 1218, 1221, 1249, 1253, 1286, 1293, 1308, 1317, 1320, 1321, 1332, 1335, and 1339 of the amino acid sequence provided in SEQ ID NO: 2, or in a corresponding mutation, or mutations, in another Cas9 sequence (e.g., any of the sequences of SEQ ID NOs: 2, 4, or 6-11), wherein X represents any amino acid.

[0169] In some embodiments, the amino acid sequence of the Cas9 protein comprises at least one, at least two, at least three, at least four, at least five, at least six, at least seven, at least eight, at least nine, at least ten, at least eleven, at least twelve, at least thirteen, at least fourteen, at least fifteen, at least sixteen, at least seventeen, at least eighteen, at least nineteen, at least twenty, at least twenty-one, at least twenty-two, at least twenty-three, at least twenty-four, at least twenty-five, at least twenty-six, at least twenty-seven, at least twenty-eight, at least twenty-nine, at least thirty, at least thirty-one, at least thirty-two, at least thirty-three, at least thirty-four, at least thirty-five, at least thirty-six, at least thirty-seven, at least thirty-eight, at least thirty-nine, at least forty, at least forty-one, at least forty-two, or at least forty-three mutations selected from the group consisting of X575S, X596Y, X631L, X649R, X664K, X710E, X740A, X743I, X748I, X750A, X753G, X765X, X790A, X797E, X853E, X922A, X961E, X985Y, X1012A, X1049G, X1057V, X1114G, X1131C, X1135N, X1150V, X1156E, X1162A, X1180G, X1180A, X1191N, X1218S, X1221H, X1249S, X1253K, X1286K, X1293T, X1308D, X1317K, X1320V, X1321S, X1332G, X1335L, and X1339I of the amino acid sequence provided in SEQ ID NO: 2, or in a corresponding mutation, or mutations, in another Cas9 sequence (e.g., any of the sequences of SEQ ID NOs: 2, 4, or 6-11), wherein X represents any amino acid.

[0170] In some embodiments, the amino acid sequence of the Cas9 protein comprises at least one, at least two, at least three, at least four, at least five, at least six, at least seven, at least eight, at least nine, at least ten, at least eleven, at least twelve, at least thirteen, at least fourteen, at least fifteen, at least sixteen, at least seventeen, at least eighteen, at least nineteen, at least twenty, at least twenty-one, at least twenty-two, at least twenty-three, at least twenty-four, at least twenty-five, at least twenty-six, at least twenty-seven, at least twenty-eight, at least twenty-nine, at least thirty, at least thirty-one, at least thirty-two, at least thirty-three, at least thirty-four, at least thirty-five, at least thirty-six, at least thirty-seven, at least thirty-eight, at least thirty-nine, at least forty, at least forty-one, at least forty-two, or at least forty-three mutations selected from the group consisting of F575S, D596Y, M631L, K649R, R664K, K710E, T740A, V743I, V748I, V750A, R753G, R765X, E790A, K797E, D853E, V922A, K961E, H985Y, D1012A, E1049G, 11057V, R1114G, Y1131C, D1135N, E1150V, K1156E, E1162A, D1180G, D1180A, K1191N, G1218S, Q1221H, P1249S, E1253K, N1286K, A1293T, N1308D, N1317K, A1320V, P1321S, D1332G, R1335L, and T1339I of the amino acid sequence provided in SEQ ID NO: 2, or in a corresponding mutation, or mutations, in another Cas9 sequence (e.g., any of the sequences of SEQ ID NOs: 2, 4, or 6-11), wherein X represents any amino acid.

[0171] In some embodiments, the amino acid sequence of the Cas9 protein comprises an X570T mutation in the amino acid sequence provided in SEQ ID NO: 2, or a corresponding mutation in another Cas9 sequence, wherein X represents any amino acid. In some embodiments, the mutation is X570S.

[0172] In some embodiments, the amino acid sequence of the Cas9 domain comprises an I570T mutation in the amino acid sequence provided in SEQ ID NO: 2, or a corresponding mutation in another Cas9 sequence. In some embodiments, the mutation is I570S.

[0173] In some embodiments, the amino acid sequence of the Cas9 protein comprises an X589S mutation in the amino acid sequence provided in SEQ ID NO: 2, or a corresponding mutation in another Cas9 sequence, wherein X represents any amino acid. In some embodiments, the mutation is X589V.

[0174] In some embodiments, the amino acid sequence of the Cas9 domain comprises an A589S mutation in the amino acid sequence provided in SEQ ID NO: 2, or a corresponding mutation in another Cas9 sequence. In some embodiments, the mutation is A589V.

[0175] In some embodiments, the amino acid sequence of the Cas9 protein comprises an X630G mutation in the amino acid sequence provided in SEQ ID NO: 2, or a corresponding mutation in another Cas9 sequence, wherein X represents any amino acid. In some embodiments, the mutation is X630K.

[0176] In some embodiments, the amino acid sequence of the Cas9 domain comprises an E630G mutation in the amino acid sequence provided in SEQ ID NO: 2, or a corresponding mutation in another Cas9 sequence. In some embodiments, the mutation is E630K.

[0177] In some embodiments, the amino acid sequence of the Cas9 protein comprises an X631A mutation in the amino acid sequence provided in SEQ ID NO: 2, or a corresponding mutation in another Cas9 sequence 2, wherein X represents any amino acid. In some embodiments, the mutation is X631I. In some embodiments, the mutation is X631L. In some embodiments, the mutation is X631V.

[0178] In some embodiments, the amino acid sequence of the Cas9 domain comprises an M631A mutation in the amino acid sequence provided in SEQ ID NO: 2, or a corresponding mutation in another Cas9 sequence. In some embodiments, the mutation is M631I. In some embodiments, the mutation is M631L. In some embodiments, the mutation is M631V.

[0179] In some embodiments, the amino acid sequence of the Cas9 protein comprises an X647A mutation in the amino acid sequence provided in SEQ ID NO: 2, or a corresponding mutation in another Cas9 sequence, wherein X represents any amino acid. In some embodiments, the mutation is X647I.

[0180] In some embodiments, the amino acid sequence of the Cas9 domain comprises an V647A mutation in the amino acid sequence provided in SEQ ID NO: 2, or a corresponding mutation in another Cas9 sequence. In some embodiments, the mutation is V647I.

[0181] In some embodiments, the amino acid sequence of the Cas9 protein comprises an X654H mutation in the amino acid sequence provided in SEQ ID NO: 2, or a corresponding mutation in another Cas9 sequence, wherein X represents any amino acid. In some embodiments, the mutation is X654I. In some embodiments, the mutation is X654L.

[0182] In some embodiments, the amino acid sequence of the Cas9 domain comprises an R654H mutation in the amino acid sequence provided in SEQ ID NO: 2, or a corresponding mutation in another Cas9 sequence. In some embodiments, the mutation is R654I. In some embodiments, the mutation is R654L.

[0183] In some embodiments, the amino acid sequence of the Cas9 protein comprises an X890E mutation in the amino acid sequence provided in SEQ ID NO: 2, or a corresponding mutation in another Cas9 sequence, wherein X represents any amino acid. In some embodiments, the mutation is X890N.

[0184] In some embodiments, the amino acid sequence of the Cas9 domain comprises a K890E mutation in the amino acid sequence provided in SEQ ID NO: 2, or a corresponding mutation in another Cas9 sequence. In some embodiments, the mutation is K890N.

[0185] In some embodiments, the amino acid sequence of the Cas9 protein comprises an X1016C mutation in the amino acid sequence provided in SEQ ID NO: 2, or a corresponding mutation in another Cas9 sequence, wherein X represents any amino acid. In some embodiments, the mutation is X1016D. In some embodiments, the mutation is X1016S.

[0186] In some embodiments, the amino acid sequence of the Cas9 domain comprises an Y1016C mutation in the amino acid sequence provided in SEQ ID NO: 2, or a corresponding mutation in another Cas9 sequence. In some embodiments, the mutation is Y1016D. In some embodiments, the mutation is Y1016S.

[0187] In some embodiments, the amino acid sequence of the Cas9 protein comprises an X1021L mutation in the amino acid sequence provided in SEQ ID NO: 2, or a corresponding mutation in another Cas9 sequence, wherein X represents any amino acid. In some embodiments, the mutation is X1021T.

[0188] In some embodiments, the amino acid sequence of the Cas9 domain comprises an M1021L mutation in the amino acid sequence provided in SEQ ID NO: 2, or a corresponding mutation in another Cas9 sequence. In some embodiments, the mutation is M1021T.

[0189] In some embodiments, the amino acid sequence of the Cas9 protein comprises an X1036D mutation in the amino acid sequence provided in SEQ ID NO: 2, or a corresponding mutation in another Cas9 sequence, wherein X represents any amino acid. In some embodiments, the mutation is X1036H.

[0190] In some embodiments, the amino acid sequence of the Cas9 domain comprises an Y1036D mutation in the amino acid sequence provided in SEQ ID NO: 2, or a corresponding mutation in another Cas9 sequence. In some embodiments, the mutation is Y1036H.

[0191] In some embodiments, the amino acid sequence of the Cas9 protein comprises an X1057S mutation in the amino acid sequence provided in SEQ ID NO: 2, or a corresponding mutation in another Cas9 sequence, wherein X represents any amino acid. In some embodiments, the mutation is X1057T. In some embodiments, the mutation is X1057V.

[0192] In some embodiments, the amino acid sequence of the Cas9 domain comprises an I1057S mutation in the amino acid sequence provided in SEQ ID NO: 2, or a corresponding mutation in another Cas9 sequence. In some embodiments, the mutation is I1057T. In some embodiments, the mutation is X1057V.

[0193] In some embodiments, the amino acid sequence of the Cas9 protein comprises an X1127A mutation in the amino acid sequence provided in SEQ ID NO: 2, or a corresponding mutation in another Cas9 sequence, wherein X represents any amino acid. In some embodiments, the mutation is X1121G.

[0194] In some embodiments, the amino acid sequence of the Cas9 domain comprises an D1127A mutation in the amino acid sequence provided in SEQ ID NO: 2, or a corresponding mutation in another Cas9 sequence. In some embodiments, the mutation is D1127G.

[0195] In some embodiments, the amino acid sequence of the Cas9 protein comprises an X1156E mutation in the amino acid sequence provided in SEQ ID NO: 2, or a corresponding mutation in another Cas9 sequence, wherein X represents any amino acid. In some embodiments, the mutation is X1156N.

[0196] In some embodiments, the amino acid sequence of the Cas9 domain comprises an K1156E mutation in the amino acid sequence provided in SEQ ID NO: 2, or a corresponding mutation in another Cas9 sequence. In some embodiments, the mutation is K1156N.

[0197] In some embodiments, the amino acid sequence of the Cas9 protein comprises an X1180E mutation in the amino acid sequence provided in SEQ ID NO: 2, or a corresponding mutation in another Cas9 sequence, wherein X represents any amino acid. In some embodiments, the mutation is X1180G.

[0198] In some embodiments, the amino acid sequence of the Cas9 domain comprises an D1180E mutation in the amino acid sequence provided in SEQ ID NO: 2, or a corresponding mutation in another Cas9 sequence. In some embodiments, the mutation is D1180G.

[0199] In some embodiments, the amino acid sequence of the Cas9 protein comprises an X1286H mutation in the amino acid sequence provided in SEQ ID NO: 2, or a corresponding mutation in another Cas9 sequence, wherein X represents any amino acid. In some embodiments, the mutation is X1286K.

[0200] In some embodiments, the amino acid sequence of the Cas9 domain comprises an N1286H mutation in the amino acid sequence provided in SEQ ID NO: 2, or a corresponding mutation in another Cas9 sequence. In some embodiments, the mutation is N1286K.

[0201] In some embodiments, the amino acid sequence of the Cas9 protein comprises an X1132G mutation in the amino acid sequence provided in SEQ ID NO: 2, or a corresponding mutation in another Cas9 sequence, wherein X represents any amino acid. In some embodiments, the mutation is X1132N.

[0202] In some embodiments, the amino acid sequence of the Cas9 domain comprises an D1132G mutation in the amino acid sequence provided in SEQ ID NO: 2, or a corresponding mutation in another Cas9 sequence. In some embodiments, the mutation is D1132N.

[0203] In some embodiments, the amino acid sequence of the Cas9 protein comprises an X1335L mutation in the amino acid sequence provided in SEQ ID NO: 2, or a corresponding mutation in another Cas9 sequence, wherein X represents any amino acid. In some embodiments, the mutation is X1335Q.

[0204] In some embodiments, the amino acid sequence of the Cas9 domain comprises an R1335L mutation in the amino acid sequence provided in SEQ ID NO: 2, or a corresponding mutation in another Cas9 sequence. In some embodiments, the mutation is R1335Q.

[0205] In some embodiments, the Cas9 protein comprises a combination of mutations that exhibit activity on a target sequence comprising a 5′-NAA-3′ PAM sequence at its 3′-end. In some embodiments, the combination of mutations are present in any one of the clones listed in Table 1. In some embodiments, the combination of mutations are conservative mutations of the clones listed in Table 1. In some embodiments, the Cas9 protein comprises the combination of mutations of any one of the Cas9 clones listed in Table 1. In some embodiments, the Cas9 protein comprises the combination of mutations present in any one of the Cas9 clones selected from the group consisting of N3.19.4c-3; N3.19.4c-4; P4.2-72-4; P4.2-72-5; P10.6.144.2; P10.5.192.7; P10.5.192.10; P10.6.144.5; P10.6.192.1; P10.6.192.9; P10.6.192.12; P13.2-8; P13.3-3; P13.4-3; P16.2-120-1; P16.2-120-2; P16.2-120-3; P16.2-120-4; P16.2-120-5; P16.2-120-6; P16.1-3; P16.3-2; P16.4-5(es); and P16.6-2. In some embodiments, the Cas9 protein comprises the combination of mutations present in any one of the Cas9 clones selected from the group consisting of N3.19.4c-3; N3.19.4c-4; P4.2-72-4; P4.2-72-5; P10.6.144.2; P10.5.192.7; P10.5.192.10; P10.6.144.5; P10.6.192.1; P10.6.192.9; P10.6.192.12; P13.2-8; P13.3-3; P13.4-3; P16.2-120-1; P16.2-120-2; P16.2-120-3; P16.2-120-4; P16.2-120-5; P16.2-120-6; P16.1-3; P16.3-2; P16.4-5(es); and P16.6-2, or a combination of conservative mutations thereto.

TABLE 1
NAA PAM Clones

| Clone | Mutations from wild-type SpCas9 (e.g., SEQ ID NO: 2) |
|---|---|
| N3.19.4-c | D177N, K218R, D614N, D1135N, P1137S, E1219V, A1320V, |
| | A1323D, R1333K |
| N3.19.4-4 | D177N, K218R, D614N, D1135N, E1219V, Q1221H, H1264Y, |
| | A1320V, R1333K |
| P4.2-72-4 | A10T, I322V, S409I, E427G, G715C, D1135N, E1219V, |
| | Q1221H, H1264Y, A1320V, R1333K |
| P4.2-72-5 | A367T, K710E, R1114G, D1135N, P1137S, E1219V, Q1221H, |
| | H1264Y, A1320V, R1333K |
| P10.6.144.2 | A10T, I322V, S409I, E427G, R753G, D861N, D1135N, |
| | K1188R, E1219V, Q1221H, H1264H, A1320V, R1333K |
| P10.5.192.7 | A10T, I322V, S409I, E427G, R654L, V743I, R753G, |
| | M1021T, D1135N, D1180G, K1211R, E1219V, Q1221H, |
| | H1264Y, A1320V, R1333K |
| P10.5.192.10 | A10T, I322V, S409I, E427G, V743I, R753G, E762G, |
| | D1135N, D1180G, K1211R, E1219V, Q1221H, H1264Y, |
| | A1320V, R1333K |
| P10.6.144.5 | A10T, I322V, S409I, E427G, R753G, D1135N, D1180G, |
| | K1211R, E1219V, Q1221H, H1264Y, S1274R, A1320V, R1333K |
| P10.6.192.1 | A10T, I322V, S409I, E427G, A589S, R753G, D1135N, |
| | E1219V, Q1221H, H1264H, A1320V, R1333K |
| P10.6.192.9 | A10T, I322V, S409I, E427G, R753G, E757K, G865G, |
| | D1135N, E1219V, Q1221H, H1264Y, A1320V, R1333K |
| P10.6.192.12 | A10T, I322V, S409I, E427G, R654L, R753G, E757K, |
| | D1135N, E1219V, Q1221H, H1264Y, A1320V, R1333K |
| P13.2-8 | A10T, I322V, S409I, E427G, K599R, M631A, R654L, K673E, |
| | V743I, R753G, N758H, E762G, D1135N, D1180G, E1219V, |
| | Q1221H, Q1256R, H1264Y, A1320V, A1323D, R1333K |
| P13.3-3 | A10T, I322V, S409I, E427G, R654L, K673E, V743I, R753G, |
| | E762G, N869S, N1054D, R1114G, D1135N, D1180G, E1219V, |
| | Q1221H, H1264Y, A1320V, A1323D, R1333K |
| P13.4-3 | A10T, I322V, S409I, E427G, R654L, L727I, V743I, R753G, |
| | E762G, R859S, N946D, F1134L, D1135N, D1180G, E1219V, |
| | Q1221H, H1264Y, N1317T, A1320V, A1323D, R1333K |
| P16.2-120-1 | A10T, I322V, S409I, E427G, R654L, K673E, V743I, R753G, |
| | E762G, N803S, N869S, Y1016D, G1077D, R1114G, F1134L, |
| | D1135N, D1180G, E1219V, Q1221H, H1264Y, V1290G, |
| | L1318S, A1320V, A1323D, R1333K |
| P16.2-120-2 | A10T, I322V, S409I, E427G, R654L, K673E, V743I, R753G, |
| | E762G, N803S, N869S, Y1016D, G1077D, R1114G, F1134L, |
| | D1135N, K1151E, D1180G, E1219V, Q1221H, H1264Y, |
| | V1290G, L1318S, A1320V, R1333K |
| P16.2-120-3 | A10T, I322V, S409I, E427G, R654L, K673E, V743I, R753G, |
| | E762G, N803S, N869S, Y1016D, G1077D, R1114G, F1134L, |
| | D1135N, D1180G, E1219V, Q1221H, H1264Y, V1290G, |
| | L1318S, A1320V, A1323D, R1333K |
| P16.2-120-4 | A10T, I322V, S409I, E427G, R654L, K673E, F693L, V743I, |
| | R753G, E762G, N803S, N869S, L921P, Y1016D, G1077D, |
| | F1080S, R1114G, D1135N, D1180G, E1219V, Q1221H, |
| | H1264Y, L1318S, A1320V, A1323D, R1333K |
| P16.2-120-5 | A10T, I322V, S409I, E427G, E630K, R654L, K673E, V743I, |
| | R753G, E762G, Q768H, N803S, N869S, Y1016D, G1077D, |
| | R1114G, F1134L, D1135N, D1180G, E1219V, Q1221H, |
| | H1264Y, L1318S, A1320V, R1333K |
| P16.2-120-6 | A10T, I322V, S409I, E427G, R654L, K673E, F693L, V743I, |
| | R753G, E762G, Q768H, N803S, N869S, Y1016D, G1077D, |
| | R1114G, F1134L, D1135N, D1180G, E1219V, Q1221H, |
| | G1223S, H1264Y, L1318S, A1320V, R1333K |
| P16.1-3 | A10T, I322V, S409I, E427G, R654L, K673E, F693L, V743I, |
| | R753G, E762G, N803S, N869S, L921P, Y1016D, G1077D, |
| | F1801S, R1114G, D1135N, D1180G, E1219V, Q1221H, |
| | H1264Y, L1318S, A1320V, A1323D, R1333K |
| P16.3-2 | A10T, I322V, S409I, E427G, R654L, V743I, R753G, |
| | M1021T, D1135N, D1180G, K1211R, E1219V, Q1221H, |
| | H1264Y, A1320V, R1333K |
| P16.4-5(es) | A10T, I322V, S409I, E427G, R654L, K673E, V743I, R753G, |
| | E762G, M673I, N803S, N869S, G1077D, R1114G, D1135N, |
| | V1139A, D1180G, E1219V, Q1221H, A1320V, R1333K |
| P16.6-2 | A10T, I322V, S409I, E427G, R654L, K673E, V743I, R753G, |
| | E762G, N803S, N869S, R1114G, D1135N, E1219V, Q1221H, |
| | A1320V, R1333K |

[0206] In some embodiments, the Cas9 protein comprises an amino acid sequence that is at least 80% identical to the amino acid sequence of a Cas9 protein as provided by any one of the variants of Table 1. In some embodiments, the Cas9 protein comprises an amino acid sequence that is at least 85%, at least 90%, at least 92%, at least 95%, at least 96%, at least 97%, at least 98%, at least 99%, or at least 99.5% identical to the amino acid sequence of a Cas9 protein as provided by any one of the variants of Table 1.

[0207] In some embodiments, the Cas9 protein exhibits an increased activity on a target sequence that does not comprise the canonical PAM (5′-NGG-3′) at its 3′ end as compared to Streptococcus pyogenes Cas9 as provided by SEQ ID NO: 2. In some embodiments, the Cas9 protein exhibits an activity on a target sequence having a 3′ end that is not directly adjacent to the canonical PAM sequence (5′-NGG-3′) that is at least 5-fold increased as compared to the activity of Streptococcus pyogenes Cas9 as provided by SEQ ID NO: 2 on the same target sequence. In some embodiments, the Cas9 protein exhibits an activity on a target sequence that is not directly adjacent to the canonical PAM sequence (5′-NGG-3′) that is at least 10-fold, at least 50-fold, at least 100-fold, at least 500-fold, at least 1,000-fold, at least 5,000-fold, at least 10,000-fold, at least 50,000-fold, at least 100,000-fold, at least 500,000-fold, or at least 1,000,000-fold increased as compared to the activity of Streptococcus pyogenes as provided by SEQ ID NO: 2 on the same target sequence. In some embodiments, the 3′ end of the target sequence is directly adjacent to an AAA, GAA, CAA, or TAA sequence.

[0208] In some embodiments, the Cas9 protein comprises a combination of mutations that exhibit activity on a target sequence comprising a 5′-NAC-3′ PAM sequence at its 3′-end. In some embodiments, the combination of mutations are present in any one of the clones listed in Table 2. In some embodiments, the combination of mutations are conservative mutations of the clones listed in Table 2. In some embodiments, the Cas9 protein comprises the combination of mutations of any one of the Cas9 clones listed in Table 2. In some embodiments, the Cas9 protein comprises the combination of mutations present in any one of the Cas9 clones selected from the group consisting of N4.CAC-1; N4.CAC-5; N4.CAC06; SacB.CAC.4h; N3.CAC-1; N3.CAC-5; N3.CAC-6; N3.CAC-8; P15.1.166-3; P15.1.166-8; P15.2.166-2; P15.3.166-4; P15.3.166-5; P15.3.166-7; P15.4.166-4; P15.4.166-8; P17.1.144-1; P17.1.144-2; P17.1.144-3; P17.1.144-4; P17.1.144-5; P17.1.144-7; P17.1.144-8; P17.2.144-1; P17.2.144-2; P17.2.144-3; P17.2.144-4; P17.2.144-5; P17.2.144-6; P17.2.144-7; P17.2.144-8; P17.1-1; P17.1-5; and P17.1.7-4(fn). In some embodiments, the Cas9 protein comprises the combination of mutations present in any one of the Cas9 clones selected from the group consisting of N4.CAC-1; N4.CAC-5; N4.CAC6; SacB.CAC.4h; N3.CAC-1; N3.CAC-5; N3.CAC-6; N3.CAC-8; P15.1.166-3; P15.1.166-8; P15.2.166-2; P15.3.166-4; P15.3.166-5; P15.3.166-7; P15.4.166-4; P15.4.166-8; P17.1.144-1; P17.1.144-2; P17.1.144-3; P17.1.144-4; P17.1.144-5; P17.1.144-7; P17.1.144-8; P17.2.144-1; P17.2.144-2; P17.2.144-3; P17.2.144-4; P17.2.144-5; P17.2.144-6; P17.2.144-7; P17.2.144-8; P17.1-1; P17.1-5; and P17.1.7-4(fn), or a combination of conservative mutations thereto.

TABLE 2
NAC PAM Clones

| Clone | Mutations from wild-type SpCas9 (e.g., SEQ ID NO: 2) |
|---|---|
| N4.CAC-1 | T472I, R753G, K890E, D1332N, R1335Q, T1337N |
| N4.CAC-5 | I1057S, D1135N, P1301S, R1335Q, T1337N |
| N4.CAC06 | T472I, R753G, D1332N, R1335Q, T1337N |
| SacB.CAC.4h | D1135N, E1219V, D1332N, R1335Q, T1337N |
| N3.CAC-1 | T472I, R753G, K890E, D1332N, R1335Q, T1337N |
| N3.CAC-5 | I1057S, D1135N, P1301S, R1335Q, T1337N |
| N3.CAC-6 | T472I, R753G, D1332N, R1335Q, T1337N |
| N3.CAC-8 | T472I, R753G, Q771H, D1332N, R1335Q, T1337N |
| P15.1.166-3 | E627K, T638P, K652T, R753G, N803S, K959N, R1114G, |
| | D1135N, E1219V, D1332N, R1335Q, T1337N |
| P15.1.166-8 | E627K, T638P, K652T, R753G, N803S, K959N, R1114G, |
| | D1135N, K1156E, E1219V, D1332N, R1335Q, T1337N |
| P15.2.166-2 | E627K, T638P, V647I, R753G, N803S, K959N, G1030R, |
| | I1055E, R1114G, D1135N, E1219V, D1332N, R1335Q, T1337N |
| P15.3.166-6 | E627K, E630G, T638P, V647A, G687R, N767D, N803S, |
| | K959N, R1114G, D1135N, E1219V, D1332G, R1335Q, T1337N |
| P15.3.166-4 | E627K, T638P, R753G, N803S, K959N, R1114G, D1135N, |
| | E1219V, N1266H, D1332N, R1335Q, T1337N |
| P15.3.166-5 | E627K, T638P, R753G, N803S, K959N, I1057T, R1114G, |
| | D1135N, E1219V, D1332N, R1335Q, T1337N |
| P15.3.166-7 | E627K, T638P, R753G, N803S, K959N, R1114G, D1135N, |
| | E1219V, D1332N, R1335Q, T1337N |
| P15.4.166-4 | E627K, M631I, T638P, R753G, N803S, K959N, Y1036H, |
| | R1114G, D1135N, E1219V, D1251G, D1332G, R1335Q, T1337N |
| P15.4.166-8 | E627K, T638P, R753G, N803S, V875I, K959N, Y1016C, |
| | R1114G, D1135N, E1219V, D1251G, D1332G, R1335Q, |
| | T1337N, I1348V |
| P17.1.144-1 | K608R, E627K, T638P, V647I, R654L, R753G, N803S, |
| | T804A, K848N, V922A, K959N, R1114G, D1135N, E1219V, |
| | D1332N, R1335Q, T1337N |
| P17.1.144-2 | K608R, E627K, T638P, V647I, R753G, N803S, V922A, |
| | K959N, K1014N, V1015A, R1114G, D1135N, K1156N, E1219V, |
| | N1252D, D1332N, R1335Q, T1337N |
| P17.1.144-3 | K608R, E627K, R629G, T638P, V647I, A711T, R753G, |
| | K775R, K789E, N803S, K959N, V1015A, Y1036H, R1114G, |
| | D1135N, E1219V, N1286H, D1332N, R1335Q, T1337N |
| P17.1.144-4 | K608R, E627K, T638P, V647I, T740A, R753G, N803S, |
| | K948E, K959N, Y1016S, R1114G, D1135N, E1219V, N1286H, |
| | D1332N, R1335Q, T1337N |
| P17.1.144-5 | K608R, E627K, T638P, V647I, T740A, N803S, K948E, |
| | K959N, Y1016S, R1114G, D1135N, E1219V, N1286H, D1332N, |
| | R1335Q, T1337N |
| P17.1.144-7 | I670S, K608R, E627K, E630G, T638P, V647I, R653K, |
| | R753G, I795L, K797N, N803S, K866R, K890N, K959N, |
| | Y1016C, R1114G, D1135N, E1219V, D1332N, R1335Q, T1337N |
| P17.1.144-8 | K608R, E627K, T638P, V647I, T740A, G752R, R753G, |
| | K797N, N803S, K948E, K959N, V1015A, Y1016S, R1114G, |
| | D1135N, E1219V, N1266H, D1332N, R1335Q, T1337N |
| P17.2.144-1 | I570T, A589V, K608R, E627K, T638P, V647I, R654L, |
| | Q716R, R753G, N803S, K948E, K959N, Y1016S, R1114G, |
| | D1135N, E1207G, E1219V, N1234D, D1332N, R1335Q, T1337N |
| P17.2.144-2 | K608R, E627K, R629G, T638P, V647I, R654L, Q740R, |
| | R753G, N803S, K959N, N990S, T995S, V1015A, Y1036D, |
| | R1114G, D1135N, E1207G, E1219V, N1234D, N1266H, |
| | D1332N, R1335Q, T1337N |
| P17.2.144-3 | I562F, V565D, I570T, K608R, L625S, E627K, T638P, |
| | V647I, R654I, G752R, R753G, N803S, N808D, K959N, |
| | M1021L, R1114G, D1135N, N1177S, N1234D, D1332N, |
| | R1335Q, T1337N |
| P17.2.144-4 | I562F, I570T, K608R, E627K, T638P, V647I, R753G, |
| | E790A, N803S, K959N, V1015A, Y1036H, R1114G, D1135N, |
| | D1180E, A1184T, E1219V, D1332N, R1335Q, T1337N |
| P17.2.144-5 | I570T, K608R, E627K, T638P, V647I, R654H, R753G, |
| | E790A, N803S, K959N, V1015A, R1114G, D1127A, D1135N, |
| | E1219V, D1332N, R1335Q, T1337N |
| P17.2.144-6 | I570T, K608R, L625S, E627K, T638P, V647I, R654I, |
| | T703P, R753G, N803S, N808D, K959N, M1021L, R1114G, |
| | D1135N, E1219V, D1332N, R1335Q, T1337N |
| P17.2.144-7 | I570S, K608R, E627K, E630G, T638P, V647I, R653K, |
| | R753G, I795L, N803S, K866R, K890N, K959N, Y1016C, |
| | R1114G, D1135N, E1219V, D1332N, R1335Q, T1337N |
| P17.2.144-8 | I570T, K608R, E627K, T638P, V647I, R654H, R753G, |
| | E790A, N803S, K959N, V1016A, R1114G, D1135N, E1219V, |
| | K1246E, D1332N, R1335Q, T1337N |
| P17.1-1 | K608R, E627K, T638P, V647I, R654L, K673E, R753G, |
| | E790A, N803S, K948E, K959N, R1114G, D1127G, D1135N, |
| | D1180E, E1219V, N1286H, D1332N, R1335Q, T1337N |
| P17.1-5 | K608R, L625S, E627K, T638P, V647I, R654I, I670T, |
| | R753G, N803S, N808D, K959N, M1021L, R1114G, D1135N, |
| | E1219V, N1286H, D1332N, R1335Q, T1337N |
| P17.1.7-4(fn) | E627K, M631V, T638P, V647I, K710E, R753G, N803S, |
| | N808D, K948E, M1021L, R1114G, D1135N, E1219V, D1332N, |
| | R1335Q, T1337N, S1338T, H1349R |

[0209] In some embodiments, the Cas9 protein comprises an amino acid sequence that is at least 80% identical to the amino acid sequence of a Cas9 protein as provided by any one of the variants of Table 2. In some embodiments, the Cas9 protein comprises an amino acid sequence that is at least 85%, at least 90%, at least 92%, at least 95%, at least 96%, at least 97%, at least 98%, at least 99%, or at least 99.5% identical to the amino acid sequence of a Cas9 protein as provided by any one of the variants of Table 2.

[0210] In some embodiments, the Cas9 protein exhibits an increased activity on a target sequence that does not comprise the canonical PAM (5′-NGG-3′) at its 3′ end as compared to Streptococcus pyogenes Cas9 as provided by SEQ ID NO: 2. In some embodiments, the Cas9 protein exhibits an activity on a target sequence having a 3′ end that is not directly adjacent to the canonical PAM sequence (5′-NGG-3′) that is at least 5-fold increased as compared to the activity of Streptococcus pyogenes Cas9 as provided by SEQ ID NO: 2 on the same target sequence. In some embodiments, the Cas9 protein exhibits an activity on a target sequence that is not directly adjacent to the canonical PAM sequence (5′-NGG-3′) that is at least 10-fold, at least 50-fold, at least 100-fold, at least 500-fold, at least 1,000-fold, at least 5,000-fold, at least 10,000-fold, at least 50,000-fold, at least 100,000-fold, at least 500,000-fold, or at least 1,000,000-fold increased as compared to the activity of Streptococcus pyogenes as provided by SEQ ID NO: 2 on the same target sequence. In some embodiments, the 3′ end of the target sequence is directly adjacent to an AAC, GAC, CAC, or TAC sequence.

[0211] In some embodiments, the Cas9 protein comprises a combination of mutations that exhibit activity on a target sequence comprising a 5′-NAT-3′ PAM sequence at its 3′-end. In some embodiments, the combination of mutations are present in any one of the clones listed in Table 3. In some embodiments, the combination of mutations are conservative mutations of the clones listed in Table 3. In some embodiments, the Cas9 protein comprises the combination of mutations of any one of the Cas9 clones listed in Table 3. In some embodiments, the Cas9 protein comprises the combination of mutations present in any one of the Cas9 clones selected from the group consisting of SacB.N4.19.TAT-4h-1; SacB.N4.19.TAT-4h-3; P12.2.b9-8; P12.3.b9-8; P12.3.b9-8 (ax); P12.3.b10-6; SacB.P12a2.AAT.3 hr.maj; SacB.P12a2.AAT.3 hr.min; P17.4-1; P17.4-2; P17.4-3; P17.4-4; P17.4-5; P17.4-6; P17.4-8; P17-4-1-1; P17-4-3-1; and P17-4-6-1. In some embodiments, the Cas9 protein comprises the combination of mutations present in any one of the Cas9 clones selected from the group consisting of SacB.N4.19.TAT-4h-1; SacB.N4.19.TAT-4h-3; P12.2.b9-8; P12.3.b9-8; P12.3.b9-8 (ax); P12.3.b10-6; SacB.P12a2.AAT.3 hr.maj; SacB.P12a2.AAT.3 hr.min; P17.4-1; P17.4-2; P17.4-3; P17.4-4; P17.4-5; P17.4-6; P17.4-8; P17-4-1-1; P17-4-3-1; and P17-4-6-1, or a combination of conservative mutations thereto.

TABLE 3
NAT PAM Clones

| Clone | Mutations from wild-type SpCas9 (e.g., SEQ ID NO: 2) |
|---|---|
| SacB.N4.19.TAT-4h-1 | K961E, H985Y, D1135N, K1191N, E1219V, Q1221H, |
| | A1320A, P1321S, R1335L |
| SacB.N4.19.TAT-4h-3 | D1135N, G1218S, E1219V, Q1221H, P1249S, |
| | P1321S, D1322G, R1335L |
| P12.2.b9-8 | V743I, R753G, E790A, D1135N, G1218S, E1219V, |
| | Q1221H, A1227V, P1249S, N1286K, A1293T, |
| | P1321S, D1322G, R1335L, T1339I |
| P12.3.b9-8 (ax) | F575S, M631L, R654L, V748I, V743I, R753G, |
| | D853E, V922A, R1114G D1135N, G1218S, E1219V, |
| | Q1221H, A1227V, P1249S, N1286K, A1293T, |
| | P1321S, D1322G, R1335L, T1339I |
| P12.3.b10-6 | F575S, M631L, R654L, R664K, R753G, D853E, |
| | V922A, R1114G D1135N, D1180G, G1218S, E1219V, |
| | Q1221H, P1249S, N1286K, P1321S, D1322G, R1335L |
| SacB.P12a2.AAT.3hr.maj | M631L, R654L, R753G, K797E, D853E, V922A, |
| | D1012A, R1114G D1135N, G1218S, E1219V, Q1221H, |
| | P1249S, N1317K, P1321S, D1322G, R1335L |
| P17.4-1 | F575S, M631L, R654L, R664K, R753G, D853E, |
| | V922A, R1114G, Y1131C, D1135N, D1180G, G1218S, |
| | E1219V, Q1221H, P1249S, P1321S, D1322G, R1335L |
| P17.4-2 | F575S, M631L, R654L, R664K, R753G, D853E, |
| | V922A, R1114G, Y1131C, D1135N, D1180G, G1218S, |
| | E1219V, Q1221H, P1249S, P1321S, D1322G, R1335L |
| P17.4-3 | F575S, D596Y, M631L, R654L, R664K, R753G, |
| | D853E, V922A, R1114G, Y1131C, D1135N, D1180G, |
| | G1218S, E1219V, Q1221H, P1249S, Q1256R, |
| | P1321S, D1322G, R1335L |
| P17.4-4 | F575S, M631L, R654L, R664K, K710E, V750A, |
| | R753G, D853E, V922A, R1114G, Y1131C, D1135N, |
| | D1180G, G1218S, E1219V, Q1221H, P1249S, |
| | P1321S, D1322G, R1335L |
| P17.4-5 | F575S, M631L, K649R, R654L, R664K, R753G, |
| | D853E, V922A, R1114G, Y1131C, D1135N, K1156E, |
| | D1180G, G1218S, E1219V, Q1221H, P1249S, |
| | P1321S, D1322G, R1335L |
| P17.4-6 | F575S, M631L, R654L, R664K, R753G, D853E, |
| | V922A, R1114G, Y1131C, D1135N, D1180G, G1218S, |
| | E1219V, Q1221H, P1249S, P1321S, D1322G, R1335L |
| P17.4-8 | F575S, M631L, R654L, R664K, R753G, D853E, |
| | V922A, I1057G, R1114G, Y1131C, D1135N, D1180G, |
| | G1218S, E1219V, Q1221H, P1249S, N1308D, |
| | P1321S, D1322G, R1335L |
| P17-4-1-1 | M631L, R654L, R753G, D853E, V922A, R1114G, |
| | Y1131C, D1135N, E1150V, D1180G, G1218S, |
| | E1219V, Q1221H, P1249S, P1321S, D1332G, R1335L |
| P17-4-3-1 | M631L, R654L, R664K, R753G, D853E, I1057V, |
| | Y1131C, D1135N, D1180G, G1218S, E1219V, |
| | Q1221H, P1249S, P1321S, D1332G, R1335L |
| P17-4-6-1 | M631L, R654L, R664K, R753G, I1057V, R1114G, |
| | Y1131C, D1135N, D1180G, G1218S, E1219V, |
| | Q1221H, P1249S, P1321S, D1332G, R1335L |

[0212] In some embodiments, the Cas9 protein comprises an amino acid sequence that is at least 80% identical to the amino acid sequence of a Cas9 protein as provided by any one of the variants of Table 3. In some embodiments, the Cas9 protein comprises an amino acid sequence that is at least 85%, at least 90%, at least 92%, at least 95%, at least 96%, at least 97%, at least 98%, at least 99%, or at least 99.5% identical to the amino acid sequence of a Cas9 protein as provided by any one of the variants of Table 3.

### Cas9 Activity

[0213] In some embodiments, the Cas9 protein exhibits an increased activity on a target sequence that does not comprise the canonical PAM (5′-NGG-3′) at its 3′ end as compared to Streptococcus pyogenes Cas9 as provided by SEQ ID NO: 2. In some embodiments, the Ca9 protein exhibits an activity on a target sequence having a 3′ end that is not directly adjacent to the canonical PAM sequence (5′-NGG-3′) that is at least 5-fold increased as compared to the activity of Streptococcus pyogenes Cas9 as provided by SEQ ID NO: 2 on the same target sequence. In some embodiments, the Cas9 protein exhibits an activity on a target sequence that is not directly adjacent to the canonical PAM sequence (5′-NGG-3′) that is at least 10-fold, at least 50-fold, at least 100-fold, at least 500-fold, at least 1,000-fold, at least 5,000-fold, at least 10,000-fold, at least 50,000-fold, at least 100,000-fold, at least 500,000-fold, or at least 1,000,000-fold increased as compared to the activity of Streptococcus pyogenes as provided by SEQ ID NO: 2 on the same target sequence. In some embodiments, the 3′ end of the target sequence is directly adjacent to an AAT, GAT, CAT, or TAT sequence.

[0214] In some embodiments, the Cas9 domain exhibits activity on a target sequence having a 3′-end that is not directly adjacent to the canonical PAM sequence (5′-NGG-3′), or on a target sequence that does not comprise the canonical PAM sequence (5′-NGG-3′), that is at least 2-fold, at least 3-fold, at least 4-fold, at least 5-fold, at least 10-fold, at least 50-fold, at least 100-fold, at least 500-fold, at least 1,000-fold, at least 5,000-fold, at least 10,000-fold, at least 50,000-fold, at least 100,000-fold, at least 500,000-fold, or at least 1,000,000-fold increased as compared to the activity of Streptococcus pyogenes Cas9 as provided by SEQ ID NO: 2 on the same target sequence. In some embodiments, the Cas9 domain exhibits activity on a target sequence having a 3′-end that is not directly adjacent to the canonical PAM sequence (5′-NGG-3′), or on a target sequence that does not comprise the canonical PAM sequence (5′-NGG-3′), that is at least 10%, at least 15%, at least 20%, at least 30%, at least 40%, at least 50%, at least 60%, at least 70%, at least 80%, or at least 90% greater than the activity of Streptococcus pyogenes Cas9 as provided by SEQ ID NO: 2 on the same target sequence. In some embodiments, the 3′-end of the target sequence is directly adjacent to an NGT, NGA, NGC, and NNG sequence, wherein N is A, G, T, or C. In some embodiments, the 3′-end of the target sequence is directly adjacent to an AAA, AAC, AAG, AAT, CAA, CAC, CAG, CAT, GAA, GAC, GAG, GAT, TAA, TAC, TAG, TAT, ACA, ACC, ACG, ACT, CCA, CCC, CCG, CCT, GCA, GCC, GCG, GCT, TCA, TCC, TCG, TCT, AGA, AGC, AGT, CGA, CGC, CGT, GGA, GGC, GGT, TGA, TGC, TGT, ATA, ATC, ATG, ATT, CTA, CTC, CTG, CTT, GTA, GTC, GTG, GTT, TTA, TTC, TTG, or TTT PAM sequence. In some embodiments, the 3-end of the target sequence is directly adjacent to an CGG, AGT, TGG, AGT, CGT, GGG, CGT, TGT, GGT, AGC, CGC, TGC, GGC, AGA, CGA, TGA, GGA, GAA, GAT, or CAA sequence. In some embodiments, the Cas9 domain activity is measured by a nuclease assay, a deamination assay, a transcriptional activation assay, a binding assay, or by PCR or sequencing. In some embodiments, the transcriptional activation assay is a reporter activation assay, such as a GFP activation assay. Exemplary methods for measuring binding activity (e.g., of Cas9) using transcriptional activation assays are known in the art and would be apparent to the skilled artisan. For example, methods for measuring Cas9 activity using the tripartite activator VPR have been described in Chavez A., et al., “Highly efficient Cas9-mediated transcriptional programming.” Nature Methods 12, 326-328 (2015), the entire contents of which are incorporated by reference herein.

[0215] In some embodiments, the Cas9 domain is mutated with respect to a corresponding wild-type protein such that the mutated Cas9 domain lacks the ability to cleave one or both strands of a target polynucleotide containing a target sequence. In particular embodiments, an aspartate-to-alanine substitution (D10A) in the RuvC1 catalytic domain of S. pyogenes Cas9 converts Cas9 from a nuclease that cleaves both strands to a nickase that nicks the targeted strand, or the strand that is complementary to the gRNA. A histidine-to-alanine substitution (H840A) in the HNH catalytic domain of S. pyogenes Cas9 generates a nick on the strand that is displaced by the gRNA during strand invasion, also referred to herein as the non-edited strand. The single catalytically active nuclease site of the nCas9 leaves a nick in the non-edited strand, which will direct mismatch repair machinery to read (rather than remove) the modified base during repair (i.e., a substituted guanine or guanine derivative at the target site). Other examples of mutations that render Cas9 a nickase include, without limitation, N854A and N863A in SpCas9, and corresponding mutations in other wild-type Cas9 proteins or variants thereof. Reference is made to U.S. Pat. No. 8,945,839, incorporated herein by reference.

[0216] In some embodiments, the amino acid sequence of the HNH domain is at least 80%, at least 85%, at least 90%, at least 92%, at least 95%, at least 96%, at least 97%, at least 98%, at least 99%, or at least 99.5% identical to the amino acid sequence of the HNH domain of any of SEQ ID NO: 2. In some embodiments, the amino acid sequence of the RuvC domain is at least 80%, at least 85%, at least 90%, at least 92%, at least 95%, at least 96%, at least 97%, at least 98%, at least 99%, or at least 99.5% identical to the amino acid sequence of the RuvC domain of SEQ ID NO: 2. In some embodiments, the Cas9 domain comprises the RuvC and HNH domains of SEQ ID NO: 2. In some embodiments, the Cas9 domain comprises a D10A and/or a H840A mutation in the amino acid sequence provided in SEQ ID NO: 2, or corresponding mutation(s) in another Cas9 sequence.

[0217] In some embodiments, the disclosure provides SpCas9 mutant proteins that work best on NRRH, NRCH, and NRTH PAMs. The SpCas9 mutant protein that works best on NARH (“es” variant), has an amino acid sequence as presented in SEQ ID NO: 22 (underligned residues are mutated from SpCas9)

(SEQ ID NO: 22)
MDKKYSIGLDIGTNSVGWAVITDEYKVPSKKFKVLGNTDRHSIKKNLIG
ALLFDSGETAEATRLKRTARRRYTRRKNRICYLQEIFSNEMAKVDDSFF
HRLEESFLVEEDKKHERHPIFGNIVDEVAYHEKYPTIYHLRKKLVDSTD
KADLRLIYLALAHMIKFRGHFLIEGDLNPDNSDVDKLFIQLVQTYNQLF
EENPINASGVDAKAILSARLSKSRRLENLIAQLPGEKKNGLFGNLIALS
LGLTPNFKSNFDLAEDAKLQLSKDTYDDDLDNLLAQIGDQYADLFLAAK
NLSDAILLSDILRVNTEITKAPLSASMVKRYDEHHQDLTLLKALVRQQL
PEKYKEIFFDQSKNGYAGYIDGGASQEEFYKFIKPILEKMDGTEELLVK
LNREDLLRKQRTFDNGIIPHQIHLGELHAILRRQGDFYPFLKDNREKIE
KILTFRIPYYVGPLARGNSRFAWMTRKSEETITPWNFEEVVDKGASAQS
FIERMTNFDKNLPNEKVLPKHSLLYEYFTVYNELTKVKYVTEGMRKPAF
LSGEQKKAIVDLLFKTNRKVTVKQLKEDYFKKIECFDSVEISGVEDRFN
ASLGTYHDLLKIIKDKDFLDNEENEDILEDIVLTLTLFEDREMIEERLK
TYAHLFDDKVMKQLKRLRYTGWGRLSRKLINGIRDKQSGKTILDFLKSD
GFANRNFMQLIHDDSLTFKEDIQKAQVSGQGDSLHEHIANLAGSPAIKK
GILQTVKVVDELVKVMGGHKPENIVIEMARENQTTQKGQKNSRERMKRI
EEGIKELGSQILKEHPVENTQLQNEKLYLYYLQNGRDMYVDQELDINRL
SDYDVDHIVPQSFLKDDSIDNKVLTRSDKNRGKSDNVPSEEVVKKMKNY
WRQLLNAKLITQRKFDNLTKAERGGLSELDKAGFIKRQLVETRQITKHV
AQILDSRMNTKYDENDKLIREVKVITLKSKLVSDFRKDFQFYKVREINN
YHHAHDAYLNAVVGTALIKKYPKLESEFVYGDYKVYDVRKMIAKSEQEI
GKATAKYFFYSNIMNFFKTEITLANGEIRKRPLIETNGETGEIVWDKGR
DFATVRKVLSMPQVNIVKKTEVQTGGFSKESILPKGNSDKLIARKKDWD
PKKYGGFNSPTAAYSVLVVAKVEKGKSKKLKSVKELLGITIMERSSFEK
NPIGFLEAKGYKEVKKDLIIKLPKYSLFELENGRKRMLASAGVLHKGNE
LALPSKYVNFLYLASHYEKLKGSPEDNEQKQLFVEQHKHYLDEIIEQIS
EFSKRVILADANLDKVLSAYNKHRDKPIREQAENIIHLFTLTNLGVPAA
FKYFDTTIDKKRYTSTKEVLDATLIHQSITGLYETRIDLSQLGGD.

[0218] The SpCas9 mutant protein that works best on NRCH (“fn” variant), has an amino acid sequence as presented in SEQ ID NO: 23 (underligned residues are mutated from SpCas9)

(SEQ ID NO: 23)
MDKKYSIGLDIGINSVGWAVITDEYKVPSKKFKVLGNIDRHSIKKNLIG
ALLFDSGETAEATRLKRTARRRYTRRKNRICYLQEIFSNEMAKVDDSFF
HRLEESFLVEEDKKHERHPIFGNIVDEVAYHEKYPTIYHLRKKLVDSTD
KADLRLIYLALAHMIKFRGHFLIEGDLNPDNSDVDKLFIQLVQTYNQLF
EENPINASGVDAKAILSARLSKSRRLENLIAQLPGEKKNGLFGNLIALS
LGLIPNFKSNFDLAEDAKLQLSKDTYDDDLDNLLAQIGDQYADLFLAAK
NLSDAILLSDILRVNTEITKAPLSASMVKRYDEHHQDLILLKALVRQQL
PEKYKEIFFDQSKNGYAGYIDGGASQEEFYKFIKPILEKMDGTEELLVK
LNREDLLRKQRTFDNGIIPHQIHLGELHAILRRQGDFYPFLKDNREKIE
KILTFRIPYYVGPLARGNSRFAWMTRKSEETITPWNFEEVVDKGASAQS
FIERMINFDKNLPNEKVLPKHSLLYEYFTVYNELTKVKYVTEGMRKPAF
LSGEQKKAIVDLLFKINRKVIVKQLKEDYFKKIECFDSVEISGVEDRFN
ASLGTYHDLLKIIKDKDFLDNEENEDILEDIVLILTLFEDREMIEERLK
TYAHLFDDKVMKQLKRLRYTGWGRLSRKLINGIRDKQSGKTILDFLKSD
GFANRNFMQLIHDDSLIFKEDIQKAQVSGQGDSLHEHIANLAGSPAIKK
GILQTVKVVDELVKVMGGHKPENIVIEMARENQTTQKGQKNSRERMKRI
EEGIKELGSQILKEHPVENTQLQNEKLYLYYLQNGRDMYVDQELDINRL
SDYDVDHIVPQSFLKDDSIDNKVLIRSDKNRGKSDNVPSEEVVKKMKNY
WRQLLNAKLITQRKFDNLIKAERGGLSELDKAGFIKRQLVETRQIIKHV
AQILDSRMNIKYDENDKLIREVKVITLKSKLVSDFRKDFQFYKVREINN
YHHAHDAYLNAVVGIALIKKYPKLESEFVYGDYKVYDVRKMIAKSEQEI
GKATAKYFFYSNIMNFFKTEITLANGEIRKRPLIETNGETGEIVWDKGR
DFATVRKVLSMPQVNIVKKTEVQTGGFSKESILPKGNSDKLIARKKDWD
PKKYGGFNSPIVAYSVLVVAKVEKGKSKKLKSVKELLGITIMERSSFEK
NPIDFLEAKGYKEVKKDLIIKLPKYSLFELENGRKRMLASAGVLQKGNE
LALPSKYVNFLYLASHYEKLKGSPEDNEQKQLFVEQHKHYLDEIIEQIS
EFSKRVILADANLDKVLSAYNKHRDKPIREQAENIIHLFTLINLGAPAA
FKYFDTTINRKQYNTIKEVLDATLIRQSITGLYETRIDLSQLGGD

[0219] The SpCas9 mutant protein that works best on NRTH (“ax” variant), has an amino acid sequence as presented in SEQ ID NO: 24 (underligned residues are mutated from SpCas9)

(SEQ ID NO: 24)
MDKKYSIGLDIGTNSVGWAVITDEYKVPSKKFKVLGNTDRHSIKKNLIG
ALLFDSGETAEATRLKRTARRRYTRRKNRICYLQEIFSNEMAKVDDSFF
HRLEESFLVEEDKKHERHPIFGNIVDEVAYHEKYPTIYHLRKKLVDSTD
KADLRLIYLALAHMIKFRGHFLIEGDLNPDNSDVDKLFIQLVQTYNQLF
EENPINASGVDAKAILSARLSKSRRLENLIAQLPGEKKNGLFGNLIALS
LGLTPNFKSNFDLAEDAKLQLSKDTYDDDLDNLLAQIGDQYADLFLAAK
NLSDAILLSDILRVNTEITKAPLSASMVKRYDEHHQDLTLLKALVRQQL
PEKYKEIFFDQSKNGYAGYIDGGASQEEFYKFIKPILEKMDGTEELLVK
LNREDLLRKQRTFDNGIIPHQIHLGELHAILRRQGDFYPFLKDNREKIE
KILTFRIPYYVGPLARGNSRFAWMTRKSEETITPWNFEEVVDKGASAQS
FIERMTNFDKNLPNEKVLPKHSLLYEYFTVYNELTKVKYVTEGMRKPAF
LSGEQKKAIVDLLFKTNRKVTVKQLKEDYFKKIECFDSVEISGVEDRFN
ASLGTYHDLLKIIKDKDFLDNEENEDILEDIVLTLTLFEDREMIEERLK
TYAHLFDDKVMKQLKRLRYTGWGRLSRKLINGIRDKQSGKTILDFLKSD
GFANRNFMQLIHDDSLTFKEDIQKAQVSGQGDSLHEHIANLAGSPAIKK
GILQTVKVVDELVKVMGGHKPENIVIEMARENQTTQKGQKNSRERMKRI
EEGIKELGSQILKEHPVENTQLQNEKLYLYYLQNGRDMYVDQELDINRL
SDYDVDHIVPQSFLKDDSIDNKVLTRSDKNRGKSDNVPSEEVVKKMKNY
WRQLLNAKLITQRKFDNLTKAERGGLSELDKAGFIKRQLVETRQITKHV
AQILDSRMNTKYDENDKLIREVKVITLKSKLVSDFRKDFQFYKVREINN
YHHAHDAYLNAVVGTALIKKYPKLESEFVYGDYKVYDVRKMIAKSEQEI
GKATAKYFFYSNIMNFFKTEITLANGEIRKRPLIETNGETGEIVWDKGR
DFATVRKVLSMPQVNIVKKTEVQTGGFSKESILPKGNSDKLIARKKDWD
PKKYGGFNSPTVAYSVLVVAKVEKGKSKKLKSVKELLGITIMERSSFEK
NPIGFLEAKGYKEVKKDLIIKLPKYSLFELENGRKRMLASASVLHKGNE
LALPSKYVNFLYLASHYEKLKGSSEDNKQKQLFVEQHKHYLDEIIEQIS
EFSKRVILADANLDKVLSAYNKHRDKPIREQAENIIHLFTLTNLGASAA
FKYFDTTIGRKLYTSTKEVLDATLIHQSITGLYETRIDLSQLGGD

[0220] Some aspects of the disclosure provide high fidelity Cas9 domains. In some embodiments, high fidelity Cas9 domains have decreased electrostatic interactions between the Cas9 domain and a sugar-phosphate backbone of a DNA, as compared to a wild-type Cas9 domain. In some embodiments, any of the Cas9 domains provided herein comprise one or more mutations that decrease the association between the Cas9 domain and a sugar-phosphate backbone of a DNA. In some embodiments, any of the Cas9 domains provided herein comprise one or more mutations that decrease the association between the Cas9 domain and a sugar-phosphate backbone of a DNA by at least 5%, at least 10%, at least 15%, at least 20%, at least 25%, at least 30%, at least 35%, at least 40%, at least 45%, at least 50%, at least 60%, at least 70%, at least 80%, at least 90%, or at least 95%. In some embodiments, any of the Cas9 domains provided herein comprise one or more of a N497X, a R661X, a Q695X, and/or a Q926X mutation of the amino acid sequence provided in SEQ ID NO: 135, or a corresponding mutation in another Cas9 sequence, wherein X is any amino acid. In some embodiments, any of the Cas9 domains provided herein comprise one or more of a N497A, a R661A, a Q695A, and/or a Q926A mutation of the amino acid sequence provided in SEQ ID NO: 135, or a corresponding mutation in another Cas9 sequence. In some embodiments, the Cas9 domain comprises a D10A mutation of the amino acid sequence provided in SEQ ID NO: 135, or a corresponding mutation in another Cas9 sequence. In some embodiments, the Cas9 domain comprises the amino acid sequence as set forth in SEQ ID NO: 135. High fidelity Cas9 domains have been described in the art and would be apparent to the skilled artisan. For example, high fidelity Cas9 domains have been described in Kleinstiver, B. P., et al. “High-fidelity CRISPR-Cas9 nucleases with no detectable genome-wide off-target effects.” Nature 529, 490-495 (2016); and Slaymaker, I. M., et al. “Rationally engineered Cas9 nucleases with improved specificity.” Science 351, 84-88 (2015); the entire contents of each are incorporated herein by reference. It should be appreciated that, based on the present disclosure and knowledge in the art, that mutations in any Cas9 domain may be generated to make high fidelity Cas9 domains that have decreased electrostatic interactions between the Cas9 domain and a sugar-phosphate backbone of a DNA, as compared to a wild-type Cas9 domain.

[0221] Cas9 domain where mutations relative to Cas9 of SEQ ID NO: 6 are shown in bold and underlines.

(SEQ ID NO: 25)
MDKKYSIGLDIGTNSVGWAVITDEYKVPSKKFKVLGNTDRHSIKKNLIG
ALLFDSGETAEATRLKRTARRRYTRRKNRICYLQEIFSNEMAKVDDSFF
HRLEESFLVEEDKKHERHPIFGNIVDEVAYHEKYPTIYHLRKKLVDSTD
KADLRLIYLALAHMIKFRGHFLIEGDLNPDNSDVDKLFIQLVQTYNQLF
EENPINASGVDAKAILSARLSKSRRLENLIAQLPGEKKNGLFGNLIALS
LGLTPNFKSNFDLAEDAKLQLSKDTYDDDLDNLLAQIGDQYADLFLAAK
NLSDAILLSDILRVNTEITKAPLSASMIKRYDEHHQDLTLLKALVRQQL
PEKYKEIFFDQSKNGYAGYIDGGASQEEFYKFIKPILEKMDGTEELLVK
LNREDLLRKQRTFDNGSIPHQIHLGELHAILRRQEDFYPFLKDNREKIE
KILTFRIPYYVGPLARGNSRFAWMTRKSEETITPWNFEEVVDKGASAQS
FIERMTAFDKNLPNEKVLPKHSLLYEYFTVYNELTKVKYVTEGMRKPAF
LSGEQKKAIVDLLFKTNRKVTVKQLKEDYFKKIECFDSVEISGVEDRFN
ASLGTYHDLLKIIKDKDFLDNEENEDILEDIVLTLTLFEDREMIEERLK
TYAHLFDDKVMKQLKRRRYTGWGALSRKLINGIRDKQSGKTILDFLKSD
GFANRNFMALIHDDSLTFKEDIQKAQVSGQGDSLHEHIANLAGSPAIKK
GILQTVKVVDELVKVMGRHKPENIVIEMARENQTTQKGQKNSRERMKRI
EEGIKELGSQILKEHPVENTQLQNEKLYLYYLQNGRDMYVDQELDINRL
SDYDVDHIVPQSFLKDDSIDNKVLTRSDKNRGKSDNVPSEEVVKKMKNY
WRQLLNAKLITQRKFDNLTKAERGGLSELDKAGFIKRQLVETRAITKHV
AQILDSRMNTKYDENDKLIREVKVITLKSKLVSDFRKDFQFYKVREINN
YHHAHDAYLNAVVGTALIKKYPKLESEFVYGDYKVYDVRKMIAKSEQEI
GKATAKYFFYSNIMNFFKTEITLANGEIRKRPLIETNGETGEIVWDKGR
DFATVRKVLSMPQVNIVKKTEVQTGGFSKESILPKRNSDKLIARKKDWD
PKKYGGFDSPTVAYSVLVVAKVEKGKSKKLKSVKELLGITIMERSSFEK
NPIDFLEAKGYKEVKKDLIIKLPKYSLFELENGRKRMLASAGELQKGNE
LALPSKYVNFLYLASHYEKLKGSPEDNEQKQLFVEQHKHYLDEIIEQIS
EFSKRVILADANLDKVLSAYNKHRDKPIREQAENIIHLFTLTNLGAPAA
FKYFDTTIDRKRYTSTKEVLDATLIHQSITGLYETRIDLSQLGGD

[0222] In some embodiments, the Cas9 domain of any of the fusion proteins provided herein comprises an amino acid sequence that is at least 60%, at least 65%, at least 70%, at least 75%, at least 80%, at least 85%, at least 90%, at least 95%, at least 96%, at least 97%, at least 98%, at least 99%, or at least 99.5% identical to the amino acid set forth as SEQ ID NO: 10 (S. aureus Cas9), below. In some embodiments, the Cas9 domain of any of the fusion proteins provided herein comprises the amino acid sequence of SEQ ID NO: 10. In some embodiments, the Cas9 domain of any of the fusion proteins provided herein consists of the amino acid sequence of SEQ ID NO: 10.

[0223] An exemplary SaCas9 amino acid sequence is:

(SEQ ID NO: 10, Staph. aureus Cas9)
KRNYILGLDIGITSVGYGIIDYETRDVIDAGVRLFKEANVENNEGRRSK
RGARRLKRRRRHRIQRVKKLLFDYNLLTDHSELSGINPYEARVKGLSQK
LSEEEFSAALLHLAKRRGVHNVNEVEEDTGNELSTKEQISRNSKALEEK
YVAELQLERLKKDGEVRGSINRFKTSDYVKEAKQLLKVQKAYHQLDQSF
IDTYIDLLETRRTYYEGPGEGSPFGWKDIKEWYEMLMGHCTYFPEELRS
VKYAYNADLYNALNDLNNLVITRDENEKLEYYEKFQIIENVFKQKKKPT
LKQIAKEILVNEEDIKGYRVTSTGKPEFTNLKVYHDIKDITARKEIIEN
AELLDQIAKILTIYQSSEDIQEELTNLNSELTQEEIEQISNLKGYTGTH
NLSLKAINLILDELWHTNDNQIAIFNRLKLVPKKVDLSQQKEIPTTLVD
DFILSPVVKRSFIQSIKVINAIIKKYGLPNDIIIELAREKNSKDAQKMI
NEMQKRNRQTNERIEEIIRTTGKENAKYLIEKIKLHDMQEGKCLYSLEA
IPLEDLLNNPFNYEVDHIIPRSVSFDNSFNNKVLVKQEENSKKGNRTPF
QYLSSSDSKISYETFKKHILNLAKGKGRISKTKKEYLLEERDINRFSVQ
KDFINRNLVDTRYATRGLMNLLRSYFRVNNLDVKVKSINGGFTSFLRRK
WKFKKERNKGYKHHAEDALIIANADFIFKEWKKLDKAKKVMENQMFEEK
QAESMPEIETEQEYKEIFITPHQIKHIKDFKDYKYSHRVDKKPNRELIN
DTLYSTRKDDKGNTLIVNNLNGLYDKDNDKLKKLINKSPEKLLMYHHDP
QTYQKLKLIMEQYGDEKNPLYKYYEETGNYLTKYSKKDNGPVIKKIKYY
GNKLNAHLDITDDYPNSRNKVVKLSLKPYRFDVYLDNGVYKFVTVKNLD
VIKKENYYEVNSKCYEEAKKLKKISNQAEFIASFYNNDLIKINGELYRV
IGVNNDLLNRIEVNMIDITYREYLENMNDKRPPRIIKTIASKTQSIKKY
STDILGNLYEVKSKKHPQIIKKG

[0224] An additional Cas9 domain with altered PAM specificity, such as a domain having at least 80%, at least 85%, at least 90%, at least 95%, or at least 99% sequence identity with wild type Geobacillus thermodenitrificans Cas9 (SEQ ID NO: 11, GeoCas9) may be used.

(SEQ ID NO: 11)
MKYKIGLDIGITSIGWAVINLDIPRIEDLGVRIFDRAENPKTGESLALP
RRLARSARRRLRRRKHRLERIRRLFVREGILTKEELNKLFEKKHEIDVW
QLRVEALDRKLNNDELARILLHLAKRRGFRSNRKSERTNKENSTMLKHI
EENQSILSSYRTVAEMVVKDPKFSLHKRNKEDNYTNTVARDDLEREIKL
IFAKQREYGNIVCTEAFEHEYISIWASQRPFASKDDIEKKVGFCTFEPK
EKRAPKATYTFQSFTVWEHINKLRLVSPGGIRALTDDERRLIYKQAFHK
NKITFHDVRTLLNLPDDTRFKGLLYDRNTTLKENEKVRFLELGAYHKIR
KAIDSVYGKGAAKSFRPIDFDTFGYALTMFKDDTDIRSYLRNEYEQNGK
RMENLADKVYDEELIEELLNLSFSKFGHLSLKALRNILPYMEQGEVYST
ACERAGYTFTGPKKKQKTVLLPNIPPIANPVVMRALTQARKVVNAIIKK
YGSPVSIHIELARELSQSFDERRKMQKEQEGNRKKNETAIRQLVEYGLT
LNPTGLDIVKFKLWSEQNGKCAYSLQPIEIERLLEPGYTEVDHVIPYSR
SLDDSYTNKVLVLTKENREKGNRTPAEYLGLGSERWQQFETFVLTNKQF
SKKKRDRLLRLHYDENEENEFKNRNLNDTRYISRFLANFIREHLKFADS
DDKQKVYTVNGRITAHLRSRWNFNKNREESNLHHAVDAAIVACTTPSDI
ARVTAFYQRREQNKELSKKTDPQFPQPWPHFADELQARLSKNPKESIKA
LNLGNYDNEKLESLQPVFVSRMPKRSITGAAHQETLRRYIGIDERSGKI
QTVVKKKLSEIQLDKTGHFPMYGKESDPRTYEAIRQRLLEHNNDPKKAF
QEPLYKPKKNGELGPIIRTIKIIDTTNQVIPLNDGKTVAYNSNIVRVDV
FEKDGKYYCVPIYTIDMMKGILPNKAIEPNKPYSEWKEMTEDYTFRFSL
YPNDLIRIEFPREKTIKTAVGEEIKIKDLFAYYQTIDSSNGGLSLVSHD
NNFSLRSIGSRTLKRFEKYQVDVLGNIYKVRGEKRVGVASSSHSKAGET
IRPL.

[0225] In some embodiments, a Cas9 domain refers to a Cas9 or Cas9 homolog from archaea (e.g., nanoarchaea), which constitute a domain and kingdom of single-celled prokaryotic microbes. In some embodiments, a Cas9 domain may comprise a CasX (now referred to as Cas12e) or CasY (now referred to as Cas12d) omain, which have been described in, for example, Burstein et al., “New CRISPR-Cas systems from uncultivated microbes.” Cell Res. 2017 Feb. 21. doi: 10.1038/cr.2017.21, and Liu et al., “CasX enzymes comprise a distinct family of RNA-guided genome editors,” Nature. 2019; 566(7743):218-223, each of which is incorporated herein by reference. Using genome-resolved metagenomics, a number of CRISPR-Cas systems were identified, including the first reported Cas9 in the archaeal domain of life. This divergent Cas9 protein was found in little-studied nanoarchaea as part of an active CRISPR-Cas system. In bacteria, two previously unknown systems were discovered, CRISPR-CasX and CRISPR-CasY, which are among the most compact systems yet discovered. In some embodiments, napDNAbp domain refers to CasX, or a variant of CasX. In some embodiments, napDNAbp domain refers to a CasY, or a variant of CasY. It should be appreciated that other RNA-guided DNA binding proteins may be used as a napDNAbp and are within the scope of this disclosure. In some embodiments, the napDNAbp comprises an amino acid sequence that is at least 85%, at least 90%, at least 91%, at least 92%, at least 93%, at least 94%, at least 95%, at least 96%, at least 97%, at least 98%, at least 99%, or at least 99.5% identical to a naturally-occurring CasX or CasY protein.

### Cytidine Deaminases

[0226] In some embodiments, the deaminase domain is a cytidine deaminase domain. A cytidine deaminase domain may also be referred to interchangeably as a cytosine deaminase domain. In some embodiments, the cytidine deaminase catalyzes the hydrolytic deamination of cytidine (C) or deoxycytidine (dC) to uridine (U) or deoxyuridine (dU), respectively. In some embodiments, the cytidine deaminase domain catalyzes the hydrolytic deamination of cytosine (C) to uracil (U). In some embodiments, the cytidine deaminase catalyzes the hydrolytic deamination of cytidine or cytosine in deoxyribonucleic acid (DNA). Without wishing to be bound by any particular theory, fusion proteins comprising a cytidine deaminase are useful inter alia for targeted editing, referred to herein as “base editing,” of nucleic acid sequences in vitro and in vivo.

[0227] One exemplary suitable type of cytidine deaminase is a cytidine deaminase, for example, of the APOBEC family. The apolipoprotein B mRNA-editing complex (APOBEC) family of cytidine deaminase enzymes encompasses eleven proteins that serve to initiate mutagenesis in a controlled and beneficial manner (see, e.g., Conticello S G. The AID/APOBEC family of nucleic acid mutators. Genome Biol. 2008; 9(6):229). One family member, activation-induced cytidine deaminase (AID), is responsible for the maturation of antibodies by converting cytosines in ssDNA to uracils in a transcription-dependent, strand-biased fashion (see, e.g., Reynaud C A, et al. What role for AID: mutator, or assembler of the immunoglobulin mutasome, Nat Immunol. 2003; 4(7):631-638). The apolipoprotein B editing complex 3 (APOBEC3) enzyme provides protection to human cells against a certain HIV-1 strain via the deamination of cytosines in reverse-transcribed viral ssDNA (see, e.g., Bhagwat A S. DNA-cytosine deaminases: from antibody maturation to antiviral defense. DNA Repair (Amst). 2004; 3(1):85-89). These proteins all require a Zn²⁺-coordinating motif (His-X-Glu-X₂₃₋₂₆-Pro-Cys-X₂₄-Cys; SEQ ID NO: 405) and bound water molecule for catalytic activity. The Glu residue acts to activate the water molecule to a zinc hydroxide for nucleophilic attack in the deamination reaction. Each family member preferentially deaminates at its own particular “hotspot”, ranging from WRC (W is A or T, R is A or G) for hAID, to TTC for hAPOBEC3F (see, e.g., Navaratnam N and Sarwar R. An overview of cytidine deaminases. Int J Hematol. 2006; 83(3):195-200). A recent crystal structure of the catalytic domain of APOBEC3G revealed a secondary structure comprised of a five-stranded β-sheet core flanked by six α-helices, which is believed to be conserved across the entire family (see, e.g., Holden L G, et al. Crystal structure of the anti-viral APOBEC3G catalytic domain and functional implications. Nature. 2008; 456(7218):121-4). The active center loops have been shown to be responsible for both ssDNA binding and in determining “hotspot” identity (see, e.g., Chelico L, et al. Biochemical basis of immunological and retroviral responses to DNA-targeted cytosine deamination by activation-induced cytidine deaminase andAPOBEC3G. J Biol Chem. 2009; 284(41). 27761-5). Overexpression of these enzymes has been linked to genomic instability and cancer, thus highlighting the importance of sequence-specific targeting (see, e.g., Pham P, et al. Reward versus risk: DNA cytidine deaminases triggering immunity and disease. Biochemistry. 2005; 44(8):2703-15).

[0228] Some aspects of this disclosure relate to the recognition that the activity of cytidine deaminase enzymes such as APOBEC enzymes can be directed to a specific site in genomic DNA. Without wishing to be bound by any particular theory, advantages of using a nucleic acid programmable binding protein (e.g., a Cas9 domain) as a recognition agent include (1) the sequence specificity of nucleic acid programmable binding protein (e.g., a Cas9 domain) can be easily altered by simply changing the sgRNA sequence; and (2) the nucleic acid programmable binding protein (e.g., a Cas9 domain) may bind to its target sequence by denaturing the dsDNA, resulting in a stretch of DNA that is single-stranded and therefore a viable substrate for the deaminase. It should be understood that other catalytic domains of napDNAbps, or catalytic domains from other nucleic acid editing proteins, can also be used to generate fusion proteins with Cas9, and that the disclosure is not limited in this regard.

[0229] In view of the results provided herein regarding the nucleotides that can be targeted by Cas9:deaminase fusion proteins, a person of ordinary skill in the art will be able to design suitable guide RNAs to target the fusion proteins to a target sequence that comprises a nucleotide to be deaminated.

[0230] In some embodiments, the cytidine deaminase is an apolipoprotein B mRNA-editing complex (APOBEC) family deaminase. In some embodiments, the cytidine deaminase is an APOBEC1 deaminase. In some embodiments, the cytidine deaminase is an APOBEC2 deaminase. In some embodiments, the cytidine deaminase is an APOBEC3 deaminase. In some embodiments, the cytidine deaminase is an APOBEC3A deaminase. In some embodiments, the cytidine deaminase is an APOBEC3B deaminase. In some embodiments, the cytidine deaminase is an APOBEC3C deaminase. In some embodiments, the cytidine deaminase is an APOBEC3D deaminase. In some embodiments, the cytidine deaminase is an APOBEC3E deaminase. In some embodiments, the cytidine deaminase is an APOBEC3F deaminase. In some embodiments, the cytidine deaminase is an APOBEC3G deaminase. In some embodiments, the cytidine deaminase is an APOBEC3H deaminase. In some embodiments, the cytidine deaminase is an APOBEC4 deaminase. In some embodiments, the cytidine deaminase is an activation-induced deaminase (AID). In some embodiments, the cytidine deaminase is a vertebrate cytidine deaminase. In some embodiments, the cytidine deaminase is an invertebrate cytidine deaminase. In some embodiments, the cytidine deaminase is a human, chimpanzee, gorilla, monkey, cow, dog, rat, or mouse deaminase. In some embodiments, the cytidine deaminase is a human cytidine deaminase. In some embodiments, the cytidine deaminase is a rat cytidine deaminase, e.g., rAPOBEC1. In some embodiments, the cytidine deaminase is a Petromyzon marinus cytidine deaminase 1 (pmCDA1) (SEQ ID NO: 58). In some embodiments, the cytidine deaminase is a human APOBEC3G (SEQ ID NO: 60). In some embodiments, the cytidine deaminase is a fragment of the human APOBEC3G. In some embodiments, the deaminase is a human APOBEC3G variant comprising a D316R and D317R mutation. In some embodiments, the deaminase is a fragment of the human APOBEC3G and comprising mutations corresponding to the D316R and D317R mutations in SEQ ID NO: 61.

[0231] In some embodiments, the nucleic acid editing domain is at least 80%, at least 85%, at least 90%, at least 92%, at least 95%, at least 96%, at least 97%, at least 98%, at least 99%, or at least 99.5% identical to the cytidine deaminase domain of any one of SEQ ID NOs: 27-61. In some embodiments, the nucleic acid editing domain comprises the amino acid sequence of any one of SEQ ID NOs: 27-61.

[0232] Some exemplary suitable nucleic-acid editing domains, e.g., cytidine deaminases and cytidine deaminase domains, that can be fused to napDNAbps (e.g., Cas9 domains) according to aspects of this disclosure are provided below. It should be understood that, in some embodiments, the active domain of the respective sequence can be used, e.g., the domain without a localizing signal (nuclear localization sequence, without nuclear export signal, cytoplasmic localizing signal).

Human AID:
(SEQ ID NO: 27)
[sequence omitted]
(underline: nuclear localization sequence; double underline: nuclear export signal)
Mouse AID:
(SEQ ID NO: 28)
MDSLLMKQKKFLYHFKNVRWAKGRHETYLCYVVKRRDSATSCSLDFGHLRNKSGCHVELLFLRYISDW
DLDPGRCYRVTWFTSWSPCYDCARHVAEFLRWNPNLSLRIFTARLYFCEDRKAEPEGLRRLHRAGVQI
GIMTFKDYFYCWNTFVENRERTFKAWEGLHENSVRLTRQLRRILLPLYEVDDLRDAFRMLGF
(underline: nuclear localization sequence; double underline: nuclear export signal)
Dog AID:
(SEQ ID NO: 29)
MDSLLMKQRKFLYHFKNVRWAKGRHETYLCYVVKRRDSATSFSLDFGHLRNKSGCHVELLFLRYISDW
DLDPGRCYRVTWFTSWSPCYDCARHVADFLRGYPNLSLRIFAARLYFCEDRKAEPEGLRRLHRAGVQI
AIMTFKDYFYCWNTFVENREKTFKAWEGLHENSVRLSRQLRRILLPLYEVDDLRDAFRTLGL
(underline: nuclear localization sequence; double underline: nuclear export signal)
Bovine AID:
(SEQ ID NO: 30)
MDSLLKKQRQFLYQFKNVRWAKGRHETYLCYVVKRRDSPTSFSLDFGHLRNKAGCHVELLFLRYISDW
DLDPGRCYRVTWFTSWSPCYDCARHVADFLRGYPNLSLRIFTARLYFCDKERKAEPEGLRRLHRAGVQ
IAIMTFKDYFYCWNTFVENHERTFKAWEGLHENSVRLSRQLRRILLPLYEVDDLRDAFRTLGL
(underline: nuclear localization sequence; double underline: nuclear export signal)
Rat AID:
(SEQ ID NO: 31)
MAVGSKPKAALVGPHWERERIWCFLCSTGLGTQQTGQTSRWLRPAATQDPVSPPRSLLMKQRKFLYHF
KNVRWAKGRHETYLCYVVKRRDSATSFSLDFGYLRNKSGCHVELLFLRYISDWDLDPGRCYRVTWFTS
WSPCYDCARHVADFLRGNPNLSLRIFTARLTGWGALPAGLMSPARPSDYFYCWNTFVENHERTFKAWE
GLHENSVRLSRRLRRILLPLYEVDDLRDAFRTLGL
(underline: nuclear localization sequence; double underline: nuclear export signal)
Mouse APOBEC-3:
(SEQ ID NO: 32)
MGPFCLGCSHRKCYSPIRNLISQETFKFHFKNLGYAKGRKDTFLCYEVTRKDCDSPVSLHHGVFKNKD
NIHAEICFLYWFHDKVLKVLSPREEFKITWYMSWSPCFECAEQIVRFLATHHNLSLDIFSSRLYNVQD
PETQQNLCRLVQEGAQVAAMDLYEFKKCWKKFVDNGGRRFRPWKRLLTNFRYQDSKLQEILRPCYIPV
PSSSSSTLSNICLTKGLPETRFCVEGRRMDPLSEEEFYSQFYNQRVKHLCYYHRMKPYLCYQLEQFNG
QAPLKGCLLSEKGKQHAEILFLDKIRSMELSQVTITCYLTWSPCPNCAWQLAAFKRDRPDLILHIYTS
RLYFHWKRPFQKGLCSLWQSGILVDVMDLPQFTDCWTNFVNPKRPFWPWKGLEIISRRTQRRLRRIKE
SWGLQDLVNDFGNLQLGPPMS
(italic: nucleic acid editing domain)
Rat APOBEC-3:
(SEQ ID NO: 33)
MGPFCLGCSHRKCYSPIRNLISQETFKFHFKNLRYAIDRKDTFLCYEVTRKDCDSPVSLHHGVFKNKD
NIHAEICFLYWFHDKVLKVLSPREEFKITWYMSWSPCFECAEQVLRFLATHHNLSLDIFSSRLYNIRD
PENQQNLCRLVQEGAQVAAMDLYEFKKCWKKFVDNGGRRFRPWKKLLTNFRYQDSKLQEILRPCYIPV
PSSSSSTLSNICLTKGLPETRFCVERRRVHLLSEEEFYSQFYNQRVKHLCYYHGVKPYLCYQLEQFNG
QAPLKGCLLSEKGKQHAEILFLDKIRSMELSQVIITCYLTWSPCPNCAWQLAAFKRDRPDLILHIYTS
RLYFHWKRPFQKGLCSLWQSGILVDVMDLPQFTDCWTNFVNPKRPFWPWKGLEIISRRTQRRLHRIKE
SWGLQDLVNDFGNLQLGPPMS
(italic: nucleic acid editing domain)
Rhesus macaque APOBEC-3G:
(SEQ ID NO: 34)
MVEPMDPRTFVSNFNNRPILSGLNTVWLCCEVKTKDPSGPPLDAKIFQGKVYSKAKYHPEMRFLRWFH
KWRQLHHDQEYKVTWYVSWSPCTRCANSVATFLAKDPKVTLTIFVARLYYFWKPDYQQALRILCQKRG
GPHATMKIMNYNEFQDCWNKFVDGRGKPFKPRNNLPKHYTLLQATLGELLRHLMDPGTFTSNFNNKPW
VSGQHETYLCYKVERLHNDTWVPLNQHRGFLRNQAPNIHGFPKGRHAELCFLDLIPFWKLDGQQYRVT
CFTSWSPCFSCAQEMAKFISNNEHVSLCIFAARIYDDQGRYQEGLRALHRDGAKIAMMNYSEFEYCWD
TFVDRQGRPFQPWDGLDEHSQALSGRLRAI
(italic: nucleic acid editing domain; underline: cytoplasmic localization signal)
Chimpanzee APOBEC-3G:
(SEQ ID NO: 35)
MKPHFRNPVERMYQDTFSDNFYNRPILSHRNTVWLCYEVKTKGPSRPPLDAKIFRGQVYSKLKYHPEM
RFFHWFSKWRKLHRDQEYEVTWYISWSPCTKCTRDVATFLAEDPKVTLTIFVARLYYFWDPDYQEALR
SLCQKRDGPRATMKIMNYDEFQHCWSKFVYSQRELFEPWNNLPKYYILLHIMLGEILRHSMDPPTFTS
NFNNELWVRGRHETYLCYEVERLHNDTWVLLNQRRGFLCNQAPHKHGFLEGRHAELCFLDVIPFWKLD
LHQDYRVTCFTSWSPCFSCAQEMAKFISNNKHVSLCIFAARIYDDQGRCQEGLRTLAKAGAKISIMTY
SEFKHCWDTFVDHQGCPFQPWDGLEEHSQALSGRLRAILQNQGN
(italic: nucleic acid editing domain; underline: cytoplasmic localization signal)
Green monkey APOBEC-3G:
(SEQ ID NO: 36)
MNPQIRNMVEQMEPDIFVYYFNNRPILSGRNTVWLCYEVKTKDPSGPPLDANIFQGKLYPEAKDHPEM
KFLHWFRKWRQLHRDQEYEVTWYVSWSPCTRCANSVATFLAEDPKVTLTIFVARLYYFWKPDYQQALR
ILCQERGGPHATMKIMNYNEFQHCWNEFVDGQGKPFKPRKNLPKHYTLLHATLGELLRHVMDPGTFTS
NFNNKPWVSGQRETYLCYKVERSHNDTWVLLNQHRGFLRNQAPDRHGFPKGRHAELCFLDLIPFWKLD
DQQYRVTCFTSWSPCFSCAQKMAKFISNNKHVSLCIFAARIYDDQGRCQEGLRTLHRDGAKIAVMNYS
EFEYCWDTFVDRQGRPFQPWDGLDEHSQALSGRLRAI
(italic: nucleic acid editing domain; underline: cytoplasmic localization signal)
Human APOBEC-3G:
(SEQ ID NO: 37)
MKPHFRNTVERMYRDTFSYNFYNRPILSRRNTVWLCYEVKTKGPSRPPLDAKIFRGQVYSELKYHPEM
RFFHWFSKWRKLHRDQEYEVTWYISWSPCTKCTRDMATFLAEDPKVTLTIFVARLYYFWDPDYQEALR
SLCQKRDGPRATMKIMNYDEFQHCWSKFVYSQRELFEPWNNLPKYYILLHIMLGEILRHSMDPPTFTF
NFNNEPWVRGRHETYLCYEVERMHNDTWVLLNQRRGFLCNQAPHKHGFLEGRHAELCFLDVIPFWKLD
LDQDYRVTCFTSWSPCFSCAQEMAKFISKNKHVSLCIFTARIYDDQGRCQEGLRTLAEAGAKISIMTY
SEFKHCWDTFVDHQGCPFQPWDGLDEHSQDLSGRLRAILQNQEN
(italic: nucleic acid editing domain; underline: cytoplasmic localization signal)
Human APOBEC-3F:
(SEQ ID NO: 38)
MKPHFRNTVERMYRDTFSYNFYNRPILSRRNTVWLCYEVKTKGPSRPRLDAKIFRGQVYSQPEHHAEM
CFLSWFCGNQLPAYKCFQITWFVSWTPCPDCVAKLAEFLAEHPNVTLTISAARLYYYWERDYRRALCR
LSQAGARVKIMDDEEFAYCWENFVYSEGQPFMPWYKFDDNYAFLHRTLKEILRNPMEAMYPHIFYFHF
KNLRKAYGRNESWLCFTMEVVKHHSPVSWKRGVFRNQVDPETHCHAERCFLSWFCDDILSPNTNYEVT
WYTSWSPCPECAGEVAEFLARHSNVNLTIFTARLYYFWDTDYQEGLRSLSQEGASVEIMGYKDFKYCW
ENFVYNDDEPFKPWKGLKYNFLFLDSKLQEILE
(italic: nucleic acid editing domain)
Human APOBEC-3B:
(SEQ ID NO: 39)
MNPQIRNPMERMYRDTFYDNFENEPILYGRSYTWLCYEVKIKRGRSNLLWDTGVFRGQVYFKPQYHAE
MCFLSWFCGNQLPAYKCFQITWFVSWTPCPDCVAKLAEFLSEHPNVTLTISAARLYYYWERDYRRALC
RLSQAGARVTIMDYEEFAYCWENFVYNEGQQFMPWYKFDENYAFLHRTLKEILRYLMDPDTFTFNFNN
DPLVLRRRQTYLCYEVERLDNGTWVLMDQHMGFLCNEAKNLLCGFYGRHAELRFLDLVPSLQLDPAQI
YRVTWFISWSPCFSWGCAGEVRAFLQENTHVRLRIFAARIYDYDPLYKEALQMLRDAGAQVSIMTYDE
FEYCWDTFVYRQGCPFQPWDGLEEHSQALSGRLRAILQNQGN
(italic: nucleic acid editing domain)
Rat APOBEC-3B:
(SEQ ID NO: 40)
MQPQGLGPNAGMGPVCLGCSHRRPYSPIRNPLKKLYQQTFYFHFKNVRYAWGRKNNFLCYEVNGMDCA
LPVPLRQGVFRKQGHIHAELCFIYWFHDKVLRVLSPMEEFKVTWYMSWSPCSKCAEQVARFLAAHRNL
SLAIFSSRLYYYLRNPNYQQKLCRLIQEGVHVAAMDLPEFKKCWNKFVDNDGQPFRPWMRLRINFSFY
DCKLQEIFSRMNLLREDVFYLQFNNSHRVKPVQNRYYRRKSYLCYQLERANGQEPLKGYLLYKKGEQH
VEILFLEKMRSMELSQVRITCYLTWSPCPNCARQLAAFKKDHPDLILRIYTSRLYFYWRKKFQKGLCT
LWRSGIHVDVMDLPQFADCWTNFVNPQRPFRPWNELEKNSWRIQRRLRRIKESWGL
Bovine APOBEC-3B:
(SEQ ID NO: 41)
DGWEVAFRSGTVLKAGVLGVSMTEGWAGSGHPGQGACVWTPGTRNTMNLLREVLFKQQFGNQPRVPAP
YYRRKTYLCYQLKQRNDLTLDRGCFRNKKQRHAEIRFIDKINSLDLNPSQSYKIICYITWSPCPNCAN
ELVNFITRNNHLKLEIFASRLYFHWIKSFKMGLQDLQNAGISVAVMTHTEFEDCWEQFVDNQSRPFQP
WDKLEQYSASIRRRLQRILTAPI
Chimpanzee APOBEC-3B:
(SEQ ID NO: 42)
MNPQIRNPMEWMYQRTFYYNFENEPILYGRSYTWLCYEVKIRRGHSNLLWDTGVFRGQMYSQPEHHAE
MCFLSWFCGNQLSAYKCFQITWFVSWTPCPDCVAKLAKFLAEHPNVTLTISAARLYYYWERDYRRALC
RLSQAGARVKIMDDEEFAYCWENFVYNEGQPFMPWYKFDDNYAFLHRTLKEIIRHLMDPDTFTFNFNN
DPLVLRRHQTYLCYEVERLDNGTWVLMDQHMGFLCNEAKNLLCGFYGRHAELRFLDLVPSLQLDPAQI
YRVTWFISWSPCFSWGCAGQVRAFLQENTHVRLRIFAARIYDYDPLYKEALQMLRDAGAQVSIMTYDE
FEYCWDTFVYRQGCPFQPWDGLEEHSQALSGRLRAILQVRASSLCMVPHRPPPPPQSPGPCLPLCSEP
PLGSLLPTGRPAPSLPFLLTASFSFPPPASLPPLPSLSLSPGHLPVPSFHSLTSCSIQPPCSSRIRET
EGWASVSKEGRDLG
Human APOBEC-3C:
(SEQ ID NO: 43)
MNPQIRNPMKAMYPGTFYFQFKNLWEANDRNETWLCFTVEGIKRRSVVSWKTGVFRNQVDSETHCHAE
RCFLSWFCEDILSPNTKYQVTWYTSWSPCPDCAGEVAEFLARHSNVNLTIFTARLYYFQYPCYQEGLR
SLSQEGVAVEIMDYEDFKYCWENFVYNDNEPFKPWKGLKTNFRLLKRRLRESLQ
(italic: nucleic acid editing domain)
Gorilla APOBEC3C:
(SEQ ID NO: 44)
MNPQIRNPMKAMYPGTFYFQFKNLWEANDRNETWLCFTVEGIKRRSVVSWKTGVFRNQVDSETHCHAE
RCFLSWFCDDILSPNTNYQVTWYTSWSPCPECAGEVAEFLARHSNVNLTIFTARLYYFQDTDYQEGLR
SLSQEGVAVKIMDYKDFKYCWENFVYNDDEPFKPWKGLKYNFRFLKRRLQEILE
(italic: nucleic acid editing domain)
Human APOBEC-3A:
(SEQ ID NO: 45)
MEASPASGPRHLMDPHIFTSNFNNGIGRHKTYLCYEVERLDNGTSVKMDQHRGFLHNQAKNLLCGFYG
RHAELRFLDLVPSLQLDPAQIYRVTWFISWSPCFSWGCAGEVRAFLQENTHVRLRIFAARIYDYDPLY
KEALQMLRDAGAQVSIMTYDEFKHCWDTFVDHQGCPFQPWDGLDEHSQALSGRLRAILQNQGN
(italic: nucleic acid editing domain)
Rhesus macaque APOBEC-3A:
(SEQ ID NO: 46)
MDGSPASRPRHLMDPNTFTFNFNNDLSVRGRHQTYLCYEVERLDNGTWVPMDERRGFLCNKAKNVPCG
DYGCHVELRFLCEVPSWQLDPAQTYRVTWFISWSPCFRRGCAGQVRVFLQENKHVRLRIFAARIYDYD
PLYQEALRTLRDAGAQVSIMTYEEFKHCWDTFVDRQGRPFQPWDGLDEHSQALSGRLRAILQNQGN
(italic: nucleic acid editing domain)
Bovine APOBEC-3A:
(SEQ ID NO: 47)
MDEYTFTENFNNQGWPSKTYLCYEMERLDGDATIPLDEYKGFVRNKGLDQPEKPCHAELYFLGKIHSW
NLDRNQHYRLTCFISWSPCYDCAQKLTTFLKENHHISLHILASRIYTHNRFGCHQSGLCELQAAGARI
TIMTFEDFKHCWETFVDHKGKPFQPWEGLNVKSQALCTELQAILKTQQN
(italic: nucleic acid editing domain)
Human APOBEC-3H:
(SEQ ID NO: 48)
MALLTAETFRLQFNNKRRLRRPYYPRKALLCYQLTPQNGSTPTRGYFENKKKCHAEICFINEIKSMGL
DETQCYQVTCYLTWSPCSSCAWELVDFIKAHDHLNLGIFASRLYYHWCKPQQKGLRLLCGSQVPVEVM
GFPKFADCWENFVDHEKPLSFNPYKMLEELDKNSRAIKRRLERIKIPGVRAQGRYMDILCDAEV
(italic: nucleic acid editing domain)
Rhesus macaque APOBEC-3H:
(SEQ ID NO: 49)
MALLTAKTFSLQFNNKRRVNKPYYPRKALLCYQLTPQNGSTPTRGHLKNKKKDHAEIRFINKIKSMGL
DETQCYQVTCYLTWSPCPSCAGELVDFIKAHRHLNLRIFASRLYYHWRPNYQEGLLLLCGSQVPVEVM
GLPEFTDCWENFVDHKEPPSFNPSEKLEELDKNSQAIKRRLERIKSRSVDVLENGLRSLQLGPVTPSS
SIRNSR
Human APOBEC-3D:
(SEQ ID NO: 50)
MNPQIRNPMERMYRDTFYDNFENEPILYGRSYTWLCYEVKIKRGRSNLLWDTGVFRGPVLPKRQSNHR
QEVYFRFENHAEMCFLSWFCGNRLPANRRFQITWFVSWNPCLPCVVKVTKFLAEHPNVTLTISAARLY
YYRDRDWRWVLLRLHKAGARVKIMDYEDFAYCWENFVCNEGQPFMPWYKFDDNYASLHRTLKEILRNP
MEAMYPHIFYFHFKNLLKACGRNESWLCFTMEVTKHHSAVFRKRGVFRNQVDPETHCHAERCFLSWFC
DDILSPNTNYEVTWYTSWSPCPECAGEVAEFLARHSNVNLTIFTARLCYFWDTDYQEGLCSLSQEGAS
VKIMGYKDFVSCWKNFVYSDDEPFKPWKGLQTNFRLLKRRLREILQ
(italic: nucleic acid editing domain)
Human APOBEC-1:
(SEQ ID NO: 51)
MTSEKGPSTGDPTLRRRIEPWEFDVFYDPRELRKEACLLYEIKWGMSRKIWRSSGKNTTNHVEVNFIK
KFTSERDFHPSMSCSITWFLSWSPCWECSQAIREFLSRHPGVTLVIYVARLFWHMDQQNRQGLRDLVN
SGVTIQIMRASEYYHCWRNFVNYPPGDEAHWPQYPPLWMMLYALELHCIILSLPPCLKISRRWQNHLT
FFRLHLQNCHYQTIPPHILLATGLIHPSVAWR
Mouse APOBEC-1:
(SEQ ID NO: 52)
MSSETGPVAVDPTLRRRIEPHEFEVFFDPRELRKETCLLYEINWGGRHSVWRHTSQNTSNHVEVNFLE
KFTTERYFRPNTRCSITWFLSWSPCGECSRAITEFLSRHPYVTLFIYIARLYHHTDQRNRQGLRDLIS
SGVTIQIMTEQEYCYCWRNFVNYPPSNEAYWPRYPHLWVKLYVLELYCIILGLPPCLKILRRKQPQLT
FFTITLQTCHYQRIPPHLLWATGLK
Rat APOBEC-1:
(SEQ ID NO: 53)
[sequence omitted]
Human APOBEC-2:
(SEQ ID NO: 54)
MAQKEEAAVATEAASQNGEDLENLDDPEKLKELIELPPFEIVTGERLPANFFKFQFRNVE
YSSGRNKTFLCYVVEAQGKGGQVQASRGYLEDEHAAAHAEEAFFNTILPAFDPALRYNVTWYVSSSPC
AACADRIIKTLSKTKNLRLLILVGRLFMWEEPEIQAALKKLKEAGCKLRIMKPQDFEYVWQNFVEQEE
GESKAFQPWEDIQENFLYYEEKLADILK
Mouse APOBEC-2:
(SEQ ID NO: 55)
MAQKEEAAEAAAPASQNGDDLENLEDPEKLKELIDLPPFEIVTGVRLPVNFFKFQFRNVEYSSGRNKT
FLCYVVEVQSKGGQAQATQGYLEDEHAGAHAEEAFFNTILPAFDPALKYNVTWYVSSSPCAACADRIL
KTLSKTKNLRLLILVSRLFMWEEPEVQAALKKLKEAGCKLRIMKPQDFEYIWQNFVEQEEGESKAFEP
WEDIQENFLYYEEKLADILK
Rat APOBEC-2:
(SEQ ID NO: 56)
MAQKEEAAEAAAPASQNGDDLENLEDPEKLKELIDLPPFEIVTGVRLPVNFFKFQFRNVEYSSGRNKT
FLCYVVEAQSKGGQVQATQGYLEDEHAGAHAEEAFFNTILPAFDPALKYNVTWYVSSSPCAACADRIL
KTLSKTKNLRLLILVSRLFMWEEPEVQAALKKLKEAGCKLRIMKPQDFEYLWQNFVEQEEGESKAFEP
WEDIQENFLYYEEKLADILK
Bovine APOBEC-2:
(SEQ ID NO: 57)
MAQKEEAAAAAEPASQNGEEVENLEDPEKLKELIELPPFEIVTGERLPAHYFKFQFRNVE
YSSGRNKTFLCYVVEAQSKGGQVQASRGYLEDEHATNHAEEAFFNSIMPTFDPALRYMVTWYVSSSPC
AACADRIVKTLNKTKNLRLLILVGRLFMWEEPEIQAALRKLKEAGCRLRIMKPQDFEYIWQNFVEQEE
GESKAFEPWEDIQENFLYYEEKLADILK
Petromyzon marinus CDA1 (pmCDA1):
(SEQ ID NO: 58)
MTDAEYVRIHEKLDIYTFKKQFFNNKKSVSHRCYVLFELKRRGERRACFWGYAVNKPQSGTERGIHAE
IFSIRKVEEYLRDNPGQFTINWYSSWSPCADCAEKILEWYNQELRGNGHTLKIWACKLYYEKNARNQI
GLWNLRDNGVGLNVMVSEHYQCCRKIFIQSSHNQLNENRWLEKTLKRAEKRRSELSIMIQVKILHTTK
SPAV
Human APOBEC3G D316R_D317R:
(SEQ ID NO: 59)
MKPHFRNTVERMYRDTFSYNFYNRPILSRRNTVWLCYEVKTKGPSRPPLDAKIFRGQVYSELKYHPEM
RFFHWFSKWRKLHRDQEYEVTWYISWSPCTKCTRDMATFLAEDPKVTLTIFVARLYYFWDPDYQEALR
SLCQKRDGPRATMKIMNYDEFQHCWSKFVYSQRELFEPWNNLPKYYILLHIMLGEILRHSMDPPTFTF
NFNNEPWVRGRHETYLCYEVERMHNDTWVLLNQRRGFLCNQAPHKHGFLEGRHAELCFLDVIPFWKLD
LDQDYRVTCFTSWSPCFSCAQEMAKFISKNKHVSLCIFTARIYRRQGRCQEGLRTLAEAGAKISIMTY
SEFKHCWDTFVDHQGCPFQPWDGLDEHSQDLSGRLRAILQNQEN
Human APOBEC3G chain
(SEQ ID NO: 60)
MDPPTFTFNFNNEPWVRGRHETYLCYEVERMHNDTWVLLNQRRGFLCNQAPHKHGFLEGRHAELCFLD
VIPFWKLDLDQDYRVTCFTSWSPCFSCAQEMAKFISKNKHVSLCIFTARIYDDQGRCQEGLRTLAEAG
AKISIMTYSEFKHCWDTFVDHQGCPFQPWDGLDEHSQDLSGRLRAILQ
Human APOBEC3G chain A D120R_D121R:
(SEQ ID NO: 60
MDPPTFTFNFNNEPWVRGRHETYLCYEVERMHNDTWVLLNQRRGFLCNQAPHKHGFLEGRHAELCFLD
VIPFWKLDLDQDYRVTCFTSWSPCFSCAQEMAKFISKNKHVSLCIFTARIYRRQGRCQEGLRTLAEAG
AKISIMTYSEFKHCWDTFVDHQGCPFQPWDGLDEHSQDLSGRLRAILQ

### Adenosine Deaminases

[0233] The disclosure provides fusion proteins that comprise one or more adenosine deaminases. In some aspects, such fusion proteins are capable of deaminating adenosine in a nucleic acid sequence (e.g., DNA or RNA). As one example, any of the fusion proteins provided herein may be base editors, (e.g., adenine base editors). Without wishing to be bound by any particular theory, dimerization of adenosine deaminases (e.g., in cis or in trans) may improve the ability (e.g., efficiency) of the fusion protein to modify a nucleic acid base, for example to deaminate adenine. In some embodiments, any of the fusion proteins may comprise 2, 3, 4 or 5 adenosine deaminases. In some embodiments, any of the fusion proteins provided herein comprise two adenosine deaminases. Exemplary, non-limiting, embodiments of adenosine deaminases are provided herein. It should be appreciated that the mutations provided herein (e.g., mutations in ecTadA) may be applied to adenosine deaminases in other adenosine base editors, for example those provided in U.S. Patent Publication No. 2018/0073012, published Mar. 15, 2018, which issued as U.S. Pat. No. 10,113,163, on Oct. 30, 2018; U.S. Patent Publication No. 2017/0121693, published May 4, 2017, which issued as U.S. Pat. No. 10,167,457 on Jan. 1, 2019; International Publication No. WO 2017/070633, published Apr. 27, 2017; U.S. Patent Publication No. 2015/0166980, published Jun. 18, 2015; U.S. Pat. No. 9,840,699, issued Dec. 12, 2017; and U.S. Pat. No. 10,077,453, issued Sep. 18, 2018, all of which are incorporated herein by reference in their entireties.

[0234] In some embodiments, any of the adenosine deaminases provided herein is capable of deaminating adenine. In some embodiments, the adenosine deaminases provided herein are capable of deaminating adenine in a deoxyadenosine residue of DNA. The adenosine deaminase may be derived from any suitable organism (e.g., E. coli). In some embodiments, the adenosine deaminase is a naturally-occurring adenosine deaminase that includes one or more mutations corresponding to any of the mutations provided herein (e.g., mutations in ecTadA). One of skill in the art will be able to identify the corresponding residue in any homologous protein and in the respective encoding nucleic acid by methods well known in the art, e.g., by sequence alignment and determination of homologous residues. Accordingly, one of skill in the art would be able to generate mutations in any naturally-occurring adenosine deaminase (e.g., having homology to ecTadA) that corresponds to any of the mutations described herein, e.g., any of the mutations identified in ecTadA. In some embodiments, the adenosine deaminase is from a prokaryote. In some embodiments, the adenosine deaminase is from a bacterium. In some embodiments, the adenosine deaminase is from Escherichia coli, Staphylococcus aureus, Salmonella typhi, Shewanella putrefaciens, Haemophilus influenzae, Caulobacter crescentus, or Bacillus subtilis. In some embodiments, the adenosine deaminase is from E. coli.

[0235] In some embodiments, the adenosine deaminase comprises an amino acid sequence that is at least 60%, at least 65%, at least 70%, at least 75%, at least 80%, at least 85%, at least 90%, at least 95%, at least 96%, at least 97%, at least 98%, at least 99%, or at least 99.5% identical to any one of the amino acid sequences set forth in any one of SEQ ID NOs: 62-84, or to any of the adenosine deaminases provided herein. It should be appreciated that adenosine deaminases provided herein may include one or more mutations (e.g., any of the mutations provided herein). The disclosure provides adenosine deaminases with a certain percent identity plus any of the mutations or combinations thereof described herein. In some embodiments, the adenosine deaminase comprises an amino acid sequence that has 1, 2, 3, 4, 5, 6, 7, 8, 9, 10, 11, 12, 13, 14, 15, 16, 17, 18, 19, 20, 21, 22, 21, 24, 25, 26, 27, 28, 29, 30, 31, 32, 33, 34, 35, 36, 37, 38, 39, 40, 41, 42, 43, 44, 45, 46, 47, 48, 49, 50, or more mutations compared to any one of the amino acid sequences set forth in SEQ ID NOs: 62-84, or any of the adenosine deaminases provided herein. In some embodiments, the adenosine deaminase comprises an amino acid sequence that has at least 5, at least 10, at least 15, at least 20, at least 25, at least 30, at least 35, at least 40, at least 45, at least 50, at least 60, at least 70, at least 80, at least 90, at least 100, at least 110, at least 120, at least 130, at least 140, at least 150, at least 160, or at least 170 identical contiguous amino acid residues as compared to any one of the amino acid sequences set forth in SEQ ID NOs: 62-84, or any of the adenosine deaminases provided herein.

[0236] In some embodiments, the adenosine deaminase comprises an E59X mutation in ecTadA SEQ ID NO: 64, or a corresponding mutation in another adenosine deaminase, where X indicates any amino acid other than the corresponding amino acid in the wild-type adenosine deaminase. In particular embodiments, the adenosine deaminase comprises a E59A mutation in SEQ ID NO: 64, or a corresponding mutation in another adenosine deaminase.

[0237] In some embodiments, the adenosine deaminase comprises a D108X mutation in ecTadA SEQ ID NO: 64, or a corresponding mutation in another adenosine deaminase, where X indicates any amino acid other than the corresponding amino acid in the wild-type adenosine deaminase. In some embodiments, the adenosine deaminase comprises a D108W, D108Q, D108F, D108K, or D108M mutation in SEQ ID NO: 64, or a corresponding mutation in another adenosine deaminase. In particular embodiments, the adenosine deaminase comprises a D108W mutation in SEQ ID NO: 64, or a corresponding mutation in another adenosine deaminase. It should be appreciated, however, that additional deaminases may similarly be aligned to identify homologous amino acid residues that may be mutated as provided herein.

[0238] In some embodiments, the adenosine deaminase comprises TadA 7.10, whose sequence is provided as SEQ ID NO: 65, or a variant thereof. TadA7.10 comprises the following mutations in ecTadA: W23R, H36L, P48A, R51L, L84F, A106V, D108N, H123Y, S146C, D147Y, R152P, E155V, 1156F, K157N.

[0239] In particular embodiments, the adenosine deaminase comprises an N108W mutation in SEQ ID NO: 65, an embodiment also referred to as TadA 7.10(N108W). Its sequence is provided as SEQ ID NO: 67.

[0240] In some embodiments, the adenosine deaminase comprises an A106X mutation in ecTadA SEQ ID NO: 64, or a corresponding mutation in another adenosine deaminase, where X indicates any amino acid other than the corresponding amino acid in the wild-type adenosine deaminase. In some embodiments, the adenosine deaminase comprises an A106V mutation in SEQ ID NO: 64, or a corresponding mutation in another adenosine deaminase. In some embodiments, the adenosine deaminase comprises an A106Q, A106F, A106W, or A106M mutation in SEQ ID NO: 64, or a corresponding mutation in another adenosine deaminase.

[0241] In particular embodiments, the adenosine deaminase comprises a V106W mutation in SEQ ID NO: 65, an embodiment also referred to as TadA 7.10(V106W). Its sequence is provided as SEQ ID NO: 66.

[0242] In some embodiments, the adenosine deaminase comprises a R47X mutation in SEQ ID NO: 65, or a corresponding mutation in another adenosine deaminase, where the presence of X indicates any amino acid other than the corresponding amino acid in the wild-type adenosine deaminase. In some embodiments, the adenosine deaminase comprises a R47Q, R47F, R47W, or R47M mutation in SEQ ID NO: 65, or a corresponding mutation in another adenosine deaminase.

[0243] In particular embodiments, the adenosine deaminase comprises a R47Q, R47F, R47W, or R47M mutation in SEQ ID NO: 65.

[0244] In particular embodiments, the adenosine deaminase comprises a V106Q mutation and an N108W mutation in SEQ ID NO: 65. In particular embodiments, the adenosine deaminase comprises a V106W mutation, an N108W mutation and an R47Z mutation, wherein Z is selected from the residues consisting of Q, F, W and M, in SEQ ID NO: 65.

[0245] It should be appreciated that any of the mutations provided herein (e.g., based on the ecTadA amino acid sequence of SEQ ID NO: 64) may be introduced into other adenosine deaminases, such as S. aureus TadA (saTadA), or other adenosine deaminases (e.g., bacterial adenosine deaminases), such as those sequences provided below. It would be apparent to the skilled artisan how to identify amino acid residues from other adenosine deaminases that are homologous to the mutated residues in ecTadA. Thus, any of the mutations identified in ecTadA may be made in other adenosine deaminases that have homologous amino acid residues. It should also be appreciated that any of the mutations provided herein may be made individually or in any combination in ecTadA or another adenosine deaminase. For example, an adenosine deaminase may contain a D108N, an A106V, and/or a R47Q mutation in ecTadA SEQ ID NO: 64, or a corresponding mutation in another adenosine deaminase.

[0246] In some embodiments, the adenosine deaminase comprises one, two, or three mutations selected from the group consisting of D108, A106, and R47 in SEQ ID NO: 64, or a corresponding mutation or mutations in another adenosine deaminase.

[0247] In other aspects, the disclosure provides adenine base editors with broadened target sequence compatibility. In general, native ecTadA deaminates the adenine in the sequence UAC (e.g., the target sequence) of the anticodon loop of tRNA^{Arg}. Without wishing to be bound by any particular theory, in order to expand the utility of ABEs comprising one or more ecTadA deaminases, such as any of the adenosine deaminases provided herein, the adenosine deaminase proteins were optimized to recognize a wide variety of target sequences within the protospacer sequence without compromising the editing efficiency of the adenosine nucleobase editor complex. In some embodiments, the target sequence is an A in the middle of a 5′-NAN-3′ sequence, wherein N is T, C, G, or A. In some embodiments, the target sequence comprises 5′-TAC-3′. In some embodiments, the target sequence comprises 5′-GAA-3′.

[0248] In some embodiments, the adenosine deaminase is an N-terminal truncated E. coli TadA. In certain embodiments, the adenosine deaminase comprises the amino acid sequence:

(SEQ ID NO: 77)
MSEVEFSHEYWMRHALTLAKRAWDEREVPVGAVLVHNNRVIGEGWNRPI
GRHDPTAHAEIMALRQGGLVMQNYRLIDATLYVTLEPCVMCAGAMIHSR
IGRVVFGARDAKTGAAGSLMDVLHHPGMNHRVEITEGILADECAALLSD
FFRMRRQEIKAQKKAQSSTD.

[0249] In some embodiments, the TadA deaminase is a full-length E. coli TadA deaminase (ecTadA). For example, in certain embodiments, the adenosine deaminase comprises the amino acid sequence:

(SEQ ID NO: 78)
MRRAFITGVFFLSEVEFSHEYWMRHALTLAKRAWDEREVPVGAVLVHNN
RVIGEGWNRPIGRHDPTAHAEIMALRQGGLVMQNYRLIDATLYVTLEPC
VMCAGAMIHSRIGRVVFGARDAKTGAAGSLMDVLHHPGMNHRVEITEGI
LADECAALLSDFFRMRRQEIKAQKKAQSSTD

[0250] It should be appreciated, however, that additional adenosine deaminases useful in the present application would be apparent to the skilled artisan and are within the scope of this disclosure. For example, the adenosine deaminase may be a homolog of an ADAT. Exemplary ADAT homologs include, without limitation:

Staphylococcus aureus TadA:
(SEQ ID NO: 79)
MGSHMTNDIYFMTLAIEEAKKAAQLGEVPIGAIITKDDEVIARAHNLRE
TLQQPTAHAEHIAIERAAKVLGSWRLEGCTLYVTLEPCVMCAGTIVMSR
IPRVVYGADDPKGGCSGSLMNLLQQSNFNHRAIVDKGVLKEACSTLLTT
FFKNLRANKKSTN
Bacillus subtilis TadA:
(SEQ ID NO: 63)
MTQDELYMKEAIKEAKKAEEKGEVPIGAVLVINGEIIARAHNLRETEQR
SIAHAEMLVIDEACKALGTWRLEGATLYVTLEPCPMCAGAVVLSRVEKV
VFGAFDPKGGCSGTLMNLLQEERFNHQAEVVSGVLEEECGGMLSAFFRE
LRKKKKAARKNLSE
Salmonella typhimurium (S. typhimurium) TadA:
(SEQ ID NO: 80)
MPPAFITGVTSLSDVELDHEYWMRHALTLAKRAWDEREVPVGAVLVHNH
RVIGEGWNRPIGRHDPTAHAEIMALRQGGLVLQNYRLLDTTLYVTLEPC
VMCAGAMVHSRIGRVVFGARDAKTGAAGSLIDVLHHPGMNHRVEIIEGV
LRDECATLLSDFFRMRRQEIKALKKADRAEGAGPAV
Shewanella putrefaciens (S. putrefaciens) TadA:
(SEQ ID NO: 81)
MDEYWMQVAMQMAEKAEAAGEVPVGAVLVKDGQQIATGYNLSISQHDPT
AHAEILCLRSAGKKLENYRLLDATLYITLEPCAMCAGAMVHSRIARVVY
GARDEKTGAAGTVVNLLQHPAFNHQVEVTSGVLAEACSAQLSRFFKRRR
DEKKALKLAQRAQQGIE
Haemophilus influenzae F3031 (H. influenzae)
TadA:
(SEQ ID NO: 82)
MDAAKVRSEFDEKMMRYALELADKAEALGEIPVGAVLVDDARNIIGEGW
NLSIVQSDPTAHAEIIALRNGAKNIQNYRLLNSTLYVTLEPCTMCAGAI
LHSRIKRLVFGASDYKTGAIGSRFHFFDDYKMNHTLEITSGVLAEECSQ
KLSTFFQKRREEKKIEKALLKSLSDK
Caulobacter crescentus (C. crescentus) TadA:
(SEQ ID NO: 83)
MRTDESEDQDHRMMRLALDAARAAAEAGETPVGAVILDPSTGEVIATAG
NGPIAAHDPTAHAEIAAMRAAAAKLGNYRLTDLTLVVTLEPCAMCAGAI
SHARIGRVVFGADDPKGGAVVHGPKFFAQPTCHWRPEVTGGVLADESAD
LLRGFFRARRKAKI
Geobacter sulfurreducens (G. sulfurreducens)
TadA:
(SEQ ID NO: 84)
MSSLKKTPIRDDAYWMGKAIREAAKAAARDEVPIGAVIVRDGAVIGRGH
NLREGSNDPSAHAEMIAIRQAARRSANWRLTGATLYVTLEPCLMCMGAI
ILARLERVVFGCYDPKGGAAGSLYDLSADPRLNHQVRLSPGVCQEECGT
MLSDFFRDLRRRKKAKATPALFIDERKVPPEP

[0251] Exemplary adenosine deaminase variants of the disclosure are described below. In certain embodiments, the adenosine deaminase has a sequence with at least 80%, at least 85%, at least 90%, at least 95%, at least 98%, at least 99%, or at least 99.5% sequence identity to one of the following:

(Ec)TadA, catalytically inactive (E59A)
(SEQ ID NO: 64)
MSEVEFSHEYWMRHALTLAKRAWDEREVPVGAVLVHNNRVIGEGWNRPI
GRHDPTAHAAIMALRQGGLVMQNYRLIDATLYVTLEPCVMCAGAMIHSR
IGRVVFGARDAKTGAAGSLMDVLHHPGMNHRVEITEGILADECAALLSD
FFRMRRQEIKAQKKAQSSTD
TadA 7.10
(SEQ ID NO: 65)
MSEVEFSHEYWMRHALTLAKRARDEREVPVGAVLVLNNRVIGEGWNRAI
GLHDPTAHAEIMALRQGGLVMQNYRLIDATLYVTFEPCVMCAGAMIHSR
IGRVVFGVRNAKTGAAGSLMDVLHYPGMNHRVEITEGILADECAALLCY
FFRMPRQVFNAQKKAQSSTD
TadA 7.10 (V106W)
(SEQ ID NO: 66)
MSEVEFSHEYWMRHALTLAKRARDEREVPVGAVLVLNNRVIGEGWNRAI
GLHDPTAHAEIMALRQGGLVMQNYRLIDATLYVTFEPCVMCAGAMIHSR
IGRVVFGWRNAKTGAAGSLMDVLHYPGMNHRVEITEGILADECAALLCY
FFRMPRQVFNAQKKAQSSTD
TadA 7.10 (N108W)
(SEQ ID NO: 67)
MSEVEFSHEYWMRHALTLAKRARDEREVPVGAVLVLNNRVIGEGWNRAI
GLHDPTAHAEIMALRQGGLVMQNYRLIDATLYVTFEPCVMCAGAMIHSR
IGRVVFGVRWAKTGAAGSLMDVLHYPGMNHRVEITEGILADECAALLCY
FFRMPRQVFNAQKKAQSSTD
TadA 7.10 (N108Q)
(SEQ ID NO: 68)
MSEVEFSHEYWMRHALTLAKRARDEREVPVGAVLVLNNRVIGEGWNRAI
GLHDPTAHAEIMALRQGGLVMQNYRLIDATLYVTFEPCVMCAGAMIHSR
IGRVVFGVRQAKTGAAGSLMDVLHYPGMNHRVEITEGILADECAALLCY
FFRMPRQVFNAQKKAQSSTD
TadA 7.10 (V106F)
(SEQ ID NO: 69)
MSEVEFSHEYWMRHALTLAKRARDEREVPVGAVLVLNNRVIGEGWNRAI
GLHDPTAHAEIMALRQGGLVMQNYRLIDATLYVTFEPCVMCAGAMIHSR
IGRVVFGFRNAKTGAAGSLMDVLHYPGMNHRVEITEGILADECAALLCY
FFRMPRQVFNAQKKAQSSTD
TadA 7.10 (V106Q)
(SEQ ID NO: 70)
MSEVEFSHEYWMRHALTLAKRARDEREVPVGAVLVLNNRVIGEGWNRAI
GLHDPTAHAEIMALRQGGLVMQNYRLIDATLYVTFEPCVMCAGAMIHSR
IGRVVFGQRNAKTGAAGSLMDVLHYPGMNHRVEITEGILADECAALLCY
FFRMPRQVFNAQKKAQSSTD
TadA 7.10 (V106M)
(SEQ ID NO: 71)
MSEVEFSHEYWMRHALTLAKRARDEREVPVGAVLVLNNRVIGEGWNRAI
GLHDPTAHAEIMALRQGGLVMQNYRLIDATLYVTFEPCVMCAGAMIHSR
IGRVVFGMRNAKTGAAGSLMDVLHYPGMNHRVEITEGILADECAALLCY
FFRMPRQVFNAQKKAQSSTD
TadA 7.10 (R47F)
(SEQ ID NO: 72)
MSEVEFSHEYWMRHALTLAKRARDEREVPVGAVLVLNNRVIGEGWNFAI
GLHDPTAHAEIMALRQGGLVMQNYRLIDATLYVTFEPCVMCAGAMIHSR
IGRVVFGVRNAKTGAAGSLMDVLHYPGMNHRVEITEGILADECAALLCY
FFRMPRQVFNAQKKAQSSTD
TadA 7.10 (R47W)
(SEQ ID NO: 73)
MSEVEFSHEYWMRHALTLAKRARDEREVPVGAVLVLNNRVIGEGWNWAI
GLHDPTAHAEIMALRQGGLVMQNYRLIDATLYVTFEPCVMCAGAMIHSR
IGRVVFGVRNAKTGAAGSLMDVLHYPGMNHRVEITEGILADECAALLCY
FFRMPRQVFNAQKKAQSSTD
TadA 7.10 (R47Q)
(SEQ ID NO: 74)
MSEVEFSHEYWMRHALTLAKRARDEREVPVGAVLVLNNRVIGEGWNQAI
GLHDPTAHAEIMALRQGGLVMQNYRLIDATLYVTFEPCVMCAGAMIHSR
IGRVVFGVRNAKTGAAGSLMDVLHYPGMNHRVEITEGILADECAALLCY
FFRMPRQVFNAQKKAQSSTD
TadA 7.10 (R47M)
(SEQ ID NO: 75)
MSEVEFSHEYWMRHALTLAKRARDEREVPVGAVLVLNNRVIGEGWNMAI
GLHDPTAHAEIMALRQGGLVMQNYRLIDATLYVTFEPCVMCAGAMIHSR
IGRVVFGVRNAKTGAAGSLMDVLHYPGMNHRVEITEGILADECAALLCY
FFRMPRQVFNAQKKAQSSTD
TadA (E59Q)
(SEQ ID NO: 76)
MSEVEFSHEYWMRHALTLAKRAWDEREVPVGAVLVHNNRVIGEGWNRPI
GRHDPTAHAQIMALRQGGLVMQNYRLIDATLYVTLEPCVMCAGAMIHSR
IGRVVFGARDAKTGAAGSLMDVLHHPGMNHRVEITEGILADECAALLSD
FFRMRRQEIKAQKKAQSSTD

[0252] Any two or more of the adenosine deaminases described herein may be connected to one another (e.g. by a linker) within an adenosine deaminase domain of the fusion proteins provided herein. For instance, the fusion proteins provided herein may contain only two adenosine deaminases. In some embodiments, the adenosine deaminases are the same. In some embodiments, the adenosine deaminases are any of the adenosine deaminases provided herein. In some embodiments, the adenosine deaminases are different. In some embodiments, the first adenosine deaminase is any of the adenosine deaminases provided herein, and the second adenosine is any of the adenosine deaminases provided herein, but is not identical to the first adenosine deaminase. In some embodiments, the fusion protein comprises two adenosine deaminases (e.g., a first adenosine deaminase and a second adenosine deaminase). In some embodiments, the fusion protein comprises a first adenosine deaminase and a second adenosine deaminase. In some embodiments, the first adenosine deaminase is N-terminal to the second adenosine deaminase in the fusion protein. In some embodiments, the first adenosine deaminase is C-terminal to the second adenosine deaminase in the fusion protein. In some embodiments, the first adenosine deaminase and the second deaminase are fused directly or via a linker.

[0253] In particular embodiments, the base editors disclosed herein comprise a heterodimer of a first adenosine deaminase that is N-terminal to a second adenosine deaminase, wherein the first adenosine deaminase comprises a sequence with at least 80%, 85%, 90%, 95%, 98%, 99%, or 99.5% sequence identity to SEQ ID NO: 62-84; and the second adenosine deaminase comprises a sequence with at least 80%, 85%, 90%, 95%, 98%, 99%, or 99.5% sequence identity to SEQ ID NO: 62-84.

[0254] In other embodiments, the second adenosine deaminase of the base editors provided herein comprises a sequence with at least 80%, 85%, 90%, 95%, 98%, 99%, or 99.5% sequence identity to SEQ ID NO: 65 (TadA 7.10), wherein any sequence variation may only occur in amino acid positions other than R47, V106 or N108 of SEQ ID NO: 65. In other words, these embodiments must contain amino acid substitutions at R47, V106 or N108 of SEQ ID NO: 65.

[0255] In other embodiments, the second adenosine deaminase of the heterodimer comprises a sequence with at least 80%, 85%, 90%, 95%, 98%, 99%, or 99.5% sequence identity to SEQ ID NO: 62-84.

### Base Editor Constructs

[0256] Any of the Cas9 domains (e.g., Cas9 domains that recognize a non-canonical PAM sequence) disclosed herein may be fused to a second protein, thus providing fusion proteins that comprise a Cas9 domain as provided herein and a second protein, or a “fusion partner.” In some embodiments, the second protein is an effector domain. As used herein, an “effector domain” refers to a molecule (e.g., a protein) that regulates a biological activity and/or is capable of modifying a biological molecule (e.g., a protein, or a nucleic acid such as DNA or RNA). In some embodiments, the effector domain is a protein. In some embodiments, the effector domain is capable of modifying a protein (e.g., a histone). In some embodiments, the effector domain is capable of modifying DNA (e.g., genomic DNA). In some embodiments, the effector domain is capable of modifying RNA (e.g., mRNA). In some embodiments, the effector molecule is a nucleic acid editing domain. In some embodiments, the effector molecule is capable of regulating an activity of a nucleic acid (e.g., transcription, and/or translation). Exemplary effector domains include, without limitation, a deaminase, a nuclease, a nickase, a recombinase, a methyltransferase, a methylase, an acetylase, an acetyltransferase, a transcriptional activator, or a transcriptional repressor domain. In some embodiments, the effector domain is a nucleic acid editing domain. Some aspects of the disclosure provide fusion proteins comprising a Cas9 domain and a nucleic acid editing domain.

[0257] In some embodiments, the fusion proteins provided herein exhibit increased activity on a target sequence that does not comprise the canonical PAM (5′-NGG-3′) at its 3′ end as compared to a fusion protein comprising Streptococcus pyogenes Cas9 as provided by SEQ ID NO: 2. In some embodiments, the fusion protein exhibits an activity on a target sequence having a 3′ end that is not directly adjacent to the canonical PAM sequence (5′-NGG-3′) that is at least 2-fold, at least 3-fold, at least 4-fold, at least 5-fold, at least 10-fold, at least 50-fold, at least 100-fold, at least 500-fold, at least 1,000-fold, at least 5,000-fold, at least 10,000-fold, at least 50,000-fold, at least 100,000-fold, at least 500,000-fold, or at least 1,000,000-fold increased as compared to the activity of a fusion protein comprising Streptococcus pyogenes Cas9 as provided by SEQ ID NO: 2 on the same target sequence. In some embodiments, the 3′ end of the target sequence is directly adjacent to a sequence selected from the group consisting of NGT, NGA, NGC, and NNG, wherein N is an A, G, T, or C. In some embodiments, the 3′ end of the target sequence is directly adjacent to a sequence selected from the group consisting of CGG, AGT, TGG, AGT, CGT, GGG, CGT, TGT, GGT, AGC, CGC, TGC, GGC, AGA, CGA, TGA, GGA, GAA, GAT, and CAA. In some embodiments, the fusion protein activity is measured by a nuclease assay, a deamination assay, a transcriptional activation assay, a binding assay, PCR, or sequencing. In some embodiments, the transcriptional activation assay is a GFP activation assay. In some embodiments, sequencing is used to measure indel formation. In some embodiments, the increased activity is increased binding. In some embodiments, the increased activity is increased deamination of a nucleobase in the target sequence.

[0258] Some aspects of the disclosure provide a fusion protein comprising a Cas9 domain fused to a nucleic acid editing domain, wherein the nucleic acid editing domain is fused to the N-terminus of the Cas9 domain. In some embodiments, the nucleic acid editing domain is fused to the C-terminus of the Cas9 domain. In some embodiments, the Cas9 domain and the nucleic acid editing-editing domain are fused via a linker. In some embodiments, the linker comprises a (GGGS)n (SEQ ID NO: 93), a (GGGGS)n (SEQ ID NO: 95), a (G)n (SEQ ID NO: 97), an (EAAAK)n (SEQ ID NO: 99), a (GGS)n (SEQ ID NO: 101), (SGGS)ₙ (SEQ ID NO: 91), an SGSETPGTSESATPES (SEQ ID NO: 89) motif (see, e.g., Guilinger J P, Thompson D B, Liu D R. Fusion of catalytically inactive Cas9 to FokI nuclease improves the specificity of genome modification. Nat. Biotechnol. 2014; 32(6): 577-82; the entire contents are incorporated herein by reference), or a combination of any of these, wherein n is independently an integer between 1 and 30. In some embodiments, n is independently 1, 2, 3, 4, 5, 6, 7, 8, 9, 10, 11, 12, 13, 14, 15, 16, 17, 18, 19, 20, 21, 22, 23, 24, 25, 26, 27, 28, 29, or 30, or, if more than one linker or more than one linker motif is present, any combination thereof. In some embodiments, the linker comprises a (GGS)n motif (SEQ ID NO: 101), wherein n is 1, 2, 3, 4, 5, 6, 7, 8, 9, 10, 11, 12, 13, 14 or 15. Additional suitable linker motifs and linker configurations will be apparent to those of ordinary skill in the art (e.g., SEQ ID NOs: 89-112). In some embodiments, suitable linker motifs and configurations include those described in Chen et al., Fusion protein linkers: property, design and functionality. Adv. Drug Deliv. Rev. 2013; 65(10):1357-69, the entire contents of which are incorporated herein by reference. Additional suitable linker sequences will be apparent to those of ordinary skill in the art based on the instant disclosure. In some embodiments, the general architecture of exemplary Cas9 fusion proteins provided herein comprises the structure:

[NH₂]-[nucleic acid editing domain]-[Cas9 domain]-[COOH];
[NH₂]-[nucleic acid editing domain]-[linker]-[Cas9 domain]-[COOH];
[NH2]-[Cas9 domain]-[nucleic acid editing domain]-[COOH]; or
[NH2]-[Cas9 domain]-[linker]-[nucleic acid editing domain]-[COOH],
wherein NH₂ is the N-terminus of the fusion protein, and COOH is the C-terminus of the fusion protein. In some embodiments, the “]-[” used in the general architecture above indicates the presence of an optional linker sequence.

[0259] The fusion proteins of the present disclosure may comprise one or more additional features. For example, in some embodiments, the fusion protein comprises a nuclear localization sequence (NLS). In some embodiments, the NLS of the fusion protein is localized between the nucleic acid editing domain and the Cas9 domain. In some embodiments, the NLS of the fusion protein is localized C-terminal to the Cas9 domain. In some embodiments, the NLS of the fusion protein is localized N-terminal to the Cas9 domain. In some embodiments, the NLS comprises the amino acid sequence of SEQ ID NO: 113 or 114. In some embodiments, the NLS comprises the amino acid sequence of SEQ ID NO: 113.

[0260] Other exemplary features that may be present are localization sequences, such as cytoplasmic localization sequences, export sequences, such as nuclear export sequences, or other localization sequences, as well as sequence tags that are useful for solubilization, purification, or detection of the fusion proteins. Suitable protein tags provided herein include, but are not limited to, biotin carboxylase carrier protein (BCCP) tags, myc-tags, calmodulin-tags, FLAG-tags, hemagglutinin (HA)-tags, polyhistidine tags, also referred to as histidine tags or His-tags, maltose binding protein (MBP)-tags, nus-tags, glutathione-S-transferase (GST)-tags, green fluorescent protein (GFP)-tags, thioredoxin-tags, S-tags, Softags (e.g., Softag 1, Softag 3), strep-tags, biotin ligase tags, FlAsH tags, V5 tags, and SBP-tags. Additional suitable sequences will be apparent to those of ordinary skill in the art. In some embodiments, the fusion protein comprises one or more His tags.

[0261] In some embodiments, the nucleic acid editing domain is a deaminase. In some embodiments, the deaminase is a cytidine deaminase. For example, in some embodiments, the general architecture of exemplary Cas9 fusion proteins with a cytidine deaminase domain comprises the structure:

[NH₂]-[NLS]-[cytidine deaminase]-[Cas9]-[COOH];
[NH₂]-[Cas9]-[cytidine deaminase]-[COOH];
[NH₂]-[cytidine deaminase]-[Cas9]-[COOH]; or
[NH₂]-[cytidine deaminase]-[Cas9]-[NLS]-[COOH],
wherein NLS is a nuclear localization sequence, NH₂ is the N-terminus of the fusion protein, and COOH is the C-terminus of the fusion protein. Nuclear localization sequences are known in the art and would be apparent to the skilled artisan. For example, NLS sequences are described in Plank et al., International PCT Application, PCT/EP2000/011690, the contents of which are incorporated herein by reference for their disclosure of exemplary nuclear localization sequences. In some embodiments, a NLS comprises the amino acid sequence PKKKRKV (SEQ ID NO: 113) or MDSLLMNRRKFLYQFKNVRWAKGRRETYLC (SEQ ID NO: 114). In some embodiments, a linker is inserted between the Cas9 and the cytidine deaminase. In some embodiments, the NLS is located C-terminal of the Cas9 domain. In some embodiments, the NLS is located N-terminal of the Cas9 domain. In some embodiments, the NLS is located between the cytidine deaminase and the Cas9 domain. In some embodiments, the NLS is located N-terminal of the cytidine deaminase domain. In some embodiments, the NLS is located C-terminal of the cytidine deaminase domain. In some embodiments, the “]-[” used in the general architecture above indicates the presence of an optional linker sequence.

[0262] In some embodiments, the fusion protein comprises any one of nucleic acid editing domains provided herein. In some embodiments, the nucleic acid editing domain is a cytidine or adenosine deaminase domain provided herein.

[0263] In some embodiments, the cytidine deaminase domain and the Cas9 domain are fused to each other via a linker. Various linker lengths and flexibilities between the deaminase domain (e.g., AID, APOBEC family deaminase) and the Cas9 domain can be employed, for example, ranging from very flexible linkers of the form (GGGS)n (SEQ ID NO: 93), (GGGGS)n (SEQ ID NO: 95), (GGS)n (SEQ ID NO: 101), and (G)n (SEQ ID NO: 97), to more rigid linkers of the form (EAAAK)n (SEQ ID NO: 99), (SGGS)n (SEQ ID NO: 91), SGGS (GGS)n (SEQ ID NO: 103), SGSETPGTSESATPES (SEQ ID NO: 89) (see, e.g., Guilinger J P, Thompson D B, Liu D R. Fusion of catalytically inactive Cas9 to FokI nuclease improves the specificity of genome modification. Nat. Biotechnol. 2014; 32(6): 577-82; the entire contents are incorporated herein by reference), (SGGS)n-SGSETPGTSESATPES-(SGGS)n (SEQ ID NO: 98), and (XP)ₙ, wherein n is an integer between 1 and 30, inclusive, in order to achieve the optimal length for deaminase activity for the specific application. In some embodiments, the linker comprises a (GGS)n motif, wherein n is 1, 3, or 7. In some embodiments, the linker comprises a SGSETPGTSESATPES (SEQ ID NO: 89) motif. In some embodiments, the linker comprises a (SGGS)2-SGSETPGTSESATPES-(SGGS)2 (SEQ ID NO: 96) motif.

[0264] In some embodiments, the fusion protein comprises a Cas9 domain (e.g., a Cas9 domain comprising one or more mutations that recognizes a non-canonical PAM sequence) fused to a cytidine deaminase domain, wherein the fusion protein comprises the amino acid sequence of SEQ ID NO: 2. In some embodiments, the fusion protein comprises any one of the amino acid sequences of SEQ ID NOs: 122-132.

[0265] Some aspects of the disclosure relate to fusion proteins that comprise a uracil glycosylase inhibitor (UGI) domain. In some embodiments, any of the fusion proteins provided herein that comprise a Cas9 domain (e.g., a Cas9 domain comprising one or more mutations that recognizes a non-canonical PAM sequence) may be further fused to a UGI domain either directly or via a linker. Some aspects of this disclosure provide deaminase-dCas9 fusion proteins, deaminase-nuclease active Cas9 fusion proteins and deaminase-Cas9 nickase fusion proteins with increased nucleobase editing efficiency. Without wishing to be bound by any particular theory, cellular DNA-repair response to the presence of U:G heteroduplex DNA may be responsible for the decrease in nucleobase editing efficiency in cells. For example, uracil DNA glycosylase (UDG) catalyzes removal of U from DNA in cells, which may initiate base excision repair, with reversion of the U:G pair to a C:G pair as the most common outcome. A Uracil DNA Glycosylase Inhibitor (UGI) may inhibit human UDG activity. Thus, this disclosure contemplates a fusion protein comprising a Cas9 domain and a nucleic acid editing domain (e.g., a deaminase) further fused to a UGI domain. In some embodiments, the fusion protein comprising a Cas9 nickase-nucleic acid editing domain further fused to a UGI domain. In some embodiments, the fusion protein comprising a dCas9-nucleic acid editing domain further fused to a UGI domain. It should be understood that the use of a UGI domain may increase the editing efficiency of a nucleic acid editing domain that is capable of catalyzing, for example, a C to U change. For example, fusion proteins comprising a UGI domain may be more efficient in deaminating C residues.

[0266] In some embodiments, the fusion protein comprises the structure:

[0267] [nucleic acid editing domain]-[optional linker sequence]-[Cas9]-[optional linker sequence]-[UGI];

[0268] [nucleic acid editing domain]-[optional linker sequence]-[UGI]-[optional linker sequence]-[Cas9];

[0269] [UGI]-[optional linker sequence]-[nucleic acid editing domain]-[optional linker sequence]-[Cas9];

[0270] [UGI]-[optional linker sequence]-[Cas9]-[optional linker sequence]-[nucleic acid editing domain];

[0271] [Cas9]-[optional linker sequence]-[nucleic acid editing domain]-[optional linker sequence]-[UGI]; or

[Cas9]-[optional linker sequence]-[UGI]-[optional linker sequence]-[nucleic acid editing domain].

[0272] In some embodiments, the fusion protein comprises the structure:

[0273] [deaminase]-[optional linker sequence]-[Cas9]-[optional linker sequence]-[UGI];

[0274] [deaminase]-[optional linker sequence]-[UGI]-[optional linker sequence]-[Cas9];

[0275] [UGI]-[optional linker sequence]-[deaminase]-[optional linker sequence]-[Cas9];

[0276] [UGI]-[optional linker sequence]-[Cas9]-[optional linker sequence]-[deaminase];

[0277] [Cas9]-[optional linker sequence]-[deaminase]-[optional linker sequence]-[UGI]; or

[0278] [Cas9]-[optional linker sequence]-[UGI]-[optional linker sequence]-[deaminase].

[0279] In some embodiments, the fusion protein comprises the structure:

[0280] [cytidine deaminase]-[optional linker sequence]-[Cas9]-[optional linker sequence]-[UGI];

[0281] [cytidine deaminase]-[optional linker sequence]-[UGI]-[optional linker sequence]-[Cas9];

[0282] [UGI]-[optional linker sequence]-[cytidine deaminase]-[optional linker sequence]-[Cas9];

[0283] [UGI]-[optional linker sequence]-[Cas9]-[optional linker sequence]-[cytidine deaminase];

[0284] [Cas9]-[optional linker sequence]-[cytidine deaminase]-[optional linker sequence]-[UGI]; or

[0285] [Cas9]-[optional linker sequence]-[UGI]-[optional linker sequence]-[cytidine deaminase].

[0286] In some embodiments, the fusion proteins provided herein do not comprise a linker sequence. In some embodiments, one or both of the optional linker sequences are present.

[0287] In some embodiments, the “-” used in the general architecture above indicates the presence of an optional linker sequence. In some embodiments, the fusion proteins comprising a UGI domain further comprise a nuclear targeting sequence, for example, a nuclear localization sequence. In some embodiments, fusion proteins provided herein further comprise a nuclear localization sequence (NLS). In some embodiments, the NLS is fused to the N-terminus of the fusion protein. In some embodiments, the NLS is fused to the C-terminus of the fusion protein. In some embodiments, the NLS is fused to the N-terminus of the UGI protein. In some embodiments, the NLS is fused to the C-terminus of the UGI protein. In some embodiments, the NLS is fused to the N-terminus of the Cas9 domain. In some embodiments, the NLS is fused to the C-terminus of the Cas9 domain. In some embodiments, the NLS is fused to the N-terminus of the deaminase. In some embodiments, the NLS is fused to the C-terminus of the deaminase. In some embodiments, the NLS is fused to the N-terminus of the second Cas9. In some embodiments, the NLS is fused to the C-terminus of the second Cas9. In some embodiments, the NLS is fused to the fusion protein via one or more linkers. In some embodiments, the NLS is fused to the fusion protein without a linker. In some embodiments, the NLS comprises an amino acid sequence of any one of the NLS sequences provided or referenced herein. In some embodiments, the NLS comprises an amino acid sequence as set forth in SEQ ID NO: 113 or SEQ ID NO: 114.

[0288] In some embodiments, a UGI domain comprises a wild-type UGI or a UGI as set forth in any of SEQ ID NOs: 115-120. In some embodiments, the UGI proteins provided herein include fragments of UGI and proteins homologous to a UGI or a UGI fragment. For example, in some embodiments, a UGI domain comprises a fragment of the amino acid sequence set forth in SEQ ID NO: 115. In some embodiments, a UGI fragment comprises an amino acid sequence that comprises at least 60%, at least 65%, at least 70%, at least 75%, at least 80%, at least 85%, at least 90%, at least 95%, at least 96%, at least 97%, at least 98%, at least 99%, or at least 99.5% of the amino acid sequence as set forth in SEQ ID NO: 115. In some embodiments, a UGI comprises an amino acid sequence homologous to the amino acid sequence set forth in SEQ ID NO: 115 or an amino acid sequence homologous to a fragment of the amino acid sequence set forth in SEQ ID NO: 115. In some embodiments, proteins comprising UGI or fragments of UGI or homologs of UGI or UGI fragments are referred to as “UGI variants.” A UGI variant shares homology to UGI, or a fragment thereof. For example a UGI variant is at least 70% identical, at least 75% identical, at least 80% identical, at least 85% identical, at least 90% identical, at least 95% identical, at least 96% identical, at least 97% identical, at least 98% identical, at least 99% identical, at least 99.5% identical, or at least 99.9% identical to a wild type UGI or a UGI as set forth in SEQ ID NO: 115. In some embodiments, the UGI variant comprises a fragment of UGI, such that the fragment is at least 70% identical, at least 80% identical, at least 90% identical, at least 95% identical, at least 96% identical, at least 97% identical, at least 98% identical, at least 99% identical, at least 99.5% identical, or at least 99.9% to the corresponding fragment of wild-type UGI or a UGI as set forth in SEQ ID NO: 115.

[0289] Suitable UGI protein and nucleotide sequences are provided herein and additional suitable UGI sequences are known to those in the art, and include, for example, those published in Wang et al., Uracil-DNA glycosylase inhibitor gene of bacteriophage PBS2 encodes a binding protein specific for uracil-DNA glycosylase. J. Biol. Chem. 264:1163-1171(1989); Lundquist et al., Site-directed mutagenesis and characterization of uracil-DNA glycosylase inhibitor protein. Role of specific carboxylic amino acids in complex formation with Escherichia coli uracil-DNA glycosylase. J. Biol. Chem. 272:21408-21419(1997); Ravishankar et al., X-ray analysis of a complex of Escherichia coli uracil DNA glycosylase (EcUDG) with a proteinaceous inhibitor. The structure elucidation of a prokaryotic UDG. Nucleic Acids Res. 26:4880-4887(1998); and Putnam et al., Protein mimicry of DNA from crystal structures of the uracil-DNA glycosylase inhibitor protein and its complex with Escherichia coli uracil-DNA glycosylase. J. Mol. Biol. 287:331-346(1999), the entire contents of each of which are incorporated herein by reference.

[0290] It should be appreciated that additional proteins may be uracil glycosylase inhibitors. For example, other proteins that are capable of inhibiting (e.g., sterically blocking) a uracil-DNA glycosylase base-excision repair enzyme are within the scope of this disclosure. Additionally, any proteins that block or inhibit base-excision repair as also within the scope of this disclosure. In some embodiments, a protein that binds DNA is used. In another embodiment, a substitute for UGI is used. In some embodiments, a uracil glycosylase inhibitor is a protein that binds single-stranded DNA. For example, a uracil glycosylase inhibitor may be a Erwinia tasmaniensis single-stranded binding protein. In some embodiments, the single-stranded binding protein comprises the amino acid sequence (SEQ ID NO: 118). In some embodiments, a uracil glycosylase inhibitor is a protein that binds uracil. In some embodiments, a uracil glycosylase inhibitor is a protein that binds uracil in DNA. In some embodiments, a uracil glycosylase inhibitor is a catalytically inactive uracil DNA-glycosylase protein. In some embodiments, a uracil glycosylase inhibitor is a catalytically inactive uracil DNA-glycosylase protein that does not excise uracil from the DNA. For example, a uracil glycosylase inhibitor is a UdgX. In some embodiments, the UdgX comprises the amino acid sequence (SEQ ID NO: 119). As another example, a uracil glycosylase inhibitor is a catalytically inactive UDG. In some embodiments, a catalytically inactive UDG comprises the amino acid sequence (SEQ ID NO: 55). It should be appreciated that other uracil glycosylase inhibitors would be apparent to the skilled artisan and are within the scope of this disclosure. In some embodiments, a uracil glycosylase inhibitor is a protein that is homologous to any one of SEQ ID NOs: 115-120. In some embodiments, a uracil glycosylase inhibitor is a protein that is at least 50% identical, at least 55% identical, at least 60% identical, at least 65% identical, at least 70% identical, at least 75% identical, at least 80% identical at least 85% identical, at least 90% identical, at least 95% identical, at least 96% identical, at least 98% identical, at least 99% identical, or at least 99.5% identical to any one of SEQ ID NOs: 115-120.

Erwinia tasmaniensis SSB (themostable single-
stranded DNA binding protein)
(SEQ ID NO: 118)
MASRGVNKVILVGNLGQDPEVRYMPNGGAVANITLATSESWRDKQTGET
KEKTEWHRVVLFGKLAEVAGEYLRKGSQVYIEGALQTRKWTDQAGVEKY
TTEVVVNVGGTMQMLGGRSQGGGASAGGQNGGSNNGWGQPQQPQGGNQF
SGGAQQQARPQQQPQQNNAPANNEPPIDFDDDIP
UdgX (binds to Uracil in DNA but does not excise)
(SEQ ID NO: 119)
MAGAQDFVPHTADLAELAAAAGECRGCGLYRDATQAVFGAGGRSARIMM
IGEQPGDKEDLAGLPFVGPAGRLLDRALEAADIDRDALYVTNAVKHFKF
TRAAGGKRRIHKTPSRTEVVACRPWLIAEMTSVEPDVVVLLGATAAKAL
LGNDFRVTQHRGEVLHVDDVPGDPALVATVHPSSLLRGPKEERESAFAG
LVDDLRVAADVRP
UDG (catalytically inactive human UDG, binds to
Uracil in DNA but does not excise)
(SEQ ID NO: 120)
MIGQKTLYSFFSPSPARKRHAPSPEPAVQGTGVAGVPEESGDAAAIPAK
KAPAGQEEPGTPPSSPLSAEQLDRIQRNKAAALLRLAARNVPVGFGESW
KKHLSGEFGKPYFIKLMGFVAEERKHYTVYPPPHQVFTWTQMCDIKDVK
VVILGQEPYHGPNQAHGLCFSVQRPVPPPPSLENIYKELSTDIEDFVHP
GHGDLSGWAKQGVLLLNAVLTVRAHQANSHKERGWEQFTDAVVSWLNQN
SNGLVFLLWGSYAQKKGSAIDRKRHHVLQTAHPSPLSVYRGFFGCRHFS
KTNELLQKSGKKPIDWKEL

[0291] In various embodiments, the fusion protein is:

xCas9(3.7)-BE3 [symbol] [symbol] [symbol]
NLS):
(SEQ ID NO: 122)

[symbol]

[symbol]

[symbol]

[symbol]

[symbol]

[symbol]

[symbol]

[symbol]

[symbol]

[symbol]

[symbol]

[symbol]

[symbol]

[symbol]

[symbol]

DKKYSIGLAIGTNSVGWAVITDEYKVP
SKKFKVLGNTDRHSIKKNLIGALLFDSGETAEATRLKRTARRRYTRRKNRICYLQEIFSNEMAKVDDS
FFHRLEESFLVEEDKKHERHPIFGNIVDEVAYHEKYPTIYHLRKKLVDSTDKADLRLIYLALAHMIKF
RGHFLIEGDLNPDNSDVDKLFIQLVQTYNQLFEENPINASGVDAKAILSARLSKSRRLENLIAQLPGE
KKNGLFGNLIALSLGLTPNFKSNFDLAEDTKLQLSKDTYDDDLDNLLAQIGDQYADLFLAAKNLSDAI
LLSDILRVNTEITKAPLSASMIKLYDEHHQDLTLLKALVRQQLPEKYKEIFFDQSKNGYAGYIDGGAS
QEEFYKFIKPILEKMDGTEELLVKLNREDLLRKQRTFDNGIIPHQIHLGELHAILRRQEDFYPFLKDN
REKIEKILTFRIPYYVGPLARGNSRFAWMTRKSEETITPWNFEKVVDKGASAQSFIERMTNFDKNLPN
EKVLPKHSLLYEYFTVYNELTKVKYVTEGMRKPAFLSGDQKKAIVDLLFKTNRKVTVKQLKEDYFKKI
ECFDSVEISGVEDRFNASLGTYHDLLKIIKDKDFLDNEENEDILEDIVLTLTLFEDREMIEERLKTYA
HLFDDKVMKQLKRRRYTGWGRLSRKLINGIRDKQSGKTILDFLKSDGFANRNFIQLIHDDSLTFKEDI
QKAQVSGQGDSLHEHIANLAGSPAIKKGILQTVKVVDELVKVMGRHKPENIVIEMARENQTTQKGQKN
SRERMKRIEEGIKELGSQILKEHPVENTQLQNEKLYLYYLQNGRDMYVDQELDINRLSDYDVDHIVPQ
SFLKDDSIDNKVLTRSDKNRGKSDNVPSEEVVKKMKNYWRQLLNAKLITQRKFDNLTKAERGGLSELD
KAGFIKRQLVETRQITKHVAQILDSRMNTKYDENDKLIREVKVITLKSKLVSDFRKDFQFYKVREINN
YHHAHDAYLNAVVGTALIKKYPKLESEFVYGDYKVYDVRKMIAKSEQEIGKATAKYFFYSNIMNFFKT
EITLANGEIRKRPLIETNGETGEIVWDKGRDFATVRKVLSMPQVNIVKKTEVQTGGFSKESILPKRNS
DKLIARKKDWDPKKYGGFDSPTVAYSVLVVAKVEKGKSKKLKSVKELLGITIMERSSFEKNPIDFLEA
KGYKEVKKDLIIKLPKYSLFELENGRKRMLASAGVLQKGNELALPSKYVNFLYLASHYEKLKGSPEDN
EQKQLFVEQHKHYLDEIIEQISEFSKRVILADANLDKVLSAYNKHRDKPIREQAENIIHLFTLTNLGA
PAAFKYFDTTIDRKRYTSTKEVLDATLIHQSITGLYETRIDLSQLGGD [symbol] TNLSDIIEKETGKQLV
IQESILMLPEEVEEVIGNKPESDILVHTAYDESTDENVMLLTSDAPEYKPWALVIQDSNGENKIKML [symbol] [symbol]
PKKKRKV
xCas9(3.6)-BE3 [symbol] [symbol] [symbol]
NLS):
(SEQ ID NO: 123)

[symbol]

[symbol]

[symbol]

[symbol]

[symbol]

[symbol]

[symbol]

[symbol]

[symbol]

[symbol]

[symbol]

[symbol]

[symbol]

[symbol]

[symbol]

DKKYSIGLAIGTNSVGWAVITDEYKVP
SKKFKVLGNTDRHSIKKNLIGALLFDSGETAEATRLKRTARRRYTRRKNRICYLQEIFSNEMAKVDDS
FFHRLEESFLVGEDKKHERHPIFGNIVDEVAYHEKYPTIYHLRKKLVDSTDKADLRLIYLALAHMIKF
RGHFLIEGDLNPDNSDVDKLFIQLVQTYNQLFEENPINASGVDAKAILSARLAKSRRLENLIAQLPGE
KKNGLFGNLIALSLGLTPNFKSNFDLAEDTKLQLSKDTYDDDLDNLLAQIGDQYADLFLAAKNLSDAI
LLSDILRVNTEITKAPLSASMIKRYDEHHQDLTLLKALVRQQLPEKYKEIFFDQSKNGYAGYIDGGAS
QEEFYKFIKPILEKMDGTEELLVKLNREDLLRKQRTFDNGIIPHQIHLGELHAILRRQEDFYPFLKDN
REKIEKILTFRIPYYVGPLARGNSRFAWMTRKSEETITPWNFEKVVDKGASAQSFIERMTNFDKNLPN
EKVLPKHSLLYEYFTVYNELTKVKYVTEGMRKPAFLSGDQKKAIVDLLFKTNRKVTVKQLKEDYFKKI
ECFDSVEISGVEDRFNASLGTYHDLLKIIKDKDFLDNEENEDILEDIVLTLTLFEDREMIEERLKTYA
HLFDDKVMKQLKRRRYTGWGRLSRKLINGIRDKQSGKTILDFLKSDGFANRNFIQLIHDDSLTFKEDI
QKAQVSGQGDSLHEHIANLAGSPAIKKGILQTVKVVDELVKVMGRHKPENIVIEMARENQTTQKGQKN
SRERMKRIEEGIKELGSQILKEHPVENTQLQNEKLYLYYLQNGRDMYVDQELDINRLSDYDVDHIVPQ
SFLKDDSIDNKVLTRSDKNRGKSDNVPSEEVVKKMKNYWRQLLNAKLITQRKFDNLTKAERGGLSELD
KAGFIKRQLVETRQITKHVAQILDSRMNTKYDENDKLIREVKVITLKSKLVSDFRKDFQFYKVREINN
YHHAHDAYLNAVVGTALIKKYPKLESEFVYGDYKVYDVRKMIAKSEQEIGKATAKYFFYSNIMNFFKT
EITLANGEIRKRPLIETNGETGEIVWDKGRDFATVRKVLSMPQVNIVKKTEVQTGGFSKESILPKRNS
DKLIARKKDWDPKKYGGFDSPTVAYSVLVVAKVEKGKSKKLKSVKELLGITIMERSSFEKNPIDFLEA
KGYKEVKKDLIIKLPKYSLFELENGRKRMLASAGVLQKGNELALPSKYVNFLYLASHYEKLKGSPEDN
EQKQLFVEQHKHYLDEIIEQISEFSKRVILADANLDKVLSAYNKHRDKPIREQAENIIHLFTLTNLGA
PAAFKYFDTTIDRKRYTSTKEVLDATLIHQSITGLYETRIDISQLGGD [symbol] TNLSDIIEKETGKOLV
IQESILMLPEEVEEVIGNKPESDILVHTAYDESTDENVMLLTSDAPEYKPWALVIQDSNGENKIKML [symbol] [symbol]
PKKKRKV
BE3 (rAPOBEC1-XTEN-Cas9n-UGI-NLS)
(SEQ ID NO: 124)
MSSETGPVAVDPTLRRRIEPHEFEVFFDPRELRKETCLLYEINWGGRHSIWRHTSQNTNKHVEVNFIEKF
TTERYFCPNTRCSITWFLSWSPCGECSRAITEFLSRYPHVTLFIYIARLYHHADPRNRQGLRDLISSGVTIQ
IMTEQESGYCWRNFVNYSPSNEAHWPRYPHLWVRLYVLELYCIILGLPPCLNILRRKQPQLTFFFIALQSC
HYQRLPPHILWATGLKSGSETPGTSESATPESDKKYSIGLAIGTNSVGWAVITDEYKVPSKKFKVLGNTDR
HSIKKNLIGALLFDSGETAEATRLKRTARRRYTRRKNRICYLQEIFSNEMAKVDDSFFHRLEESFLVEEDKK
HERHPIFGNIVDEVAYHEKYPTIYHLRKKLVDSTDKAKLRLIYLALAHMIKFRGHFLIEGDLNPDNSDVDKLF
IQLVQTYNQLFEENPINASGVDAKAILSARLSKSRRLENLIAQLPGEKKNGLFGNLIALSLGLTPNFKSNFDL
AEDAKLQLSKDTYDDDLDNLLAQIGDQYADLFLAAKNLSDAILLSDILRVNTEITKAPLSASMIKRYDEHHQ
DLTLLKALVRQQLPEKYKEIFFDQSKNGYAGYIDGGASQEEFYKFIKPILEKMDGTEELLVKLNREDLLRKQ
RTFDNGSIPHQIHLGELHAILRRQEDFYPFLKDNREKIEKILTFRIPYYVGPLARGNSRFAWMTRKEETITP
WNFEEVVDKGASAQSFIERMTNFDKNLPNEKVLPKHSLLYEYFTVYNELTKVKYVTEGMRKPAFLSGEQ
KKAIVDLLFKTNRKVTVKQLKEDYFKKIECFDSVEISGVEDRFNASLGTYHDLLKIIKDKDFLDNEENEDILE
DIVLTLILFEDREMIEERLKTYAHLFDDKVMKQLKRRRYTGWGRLSRKLINGIRDKQSGKTILDFLKSDGFA
NRNFMQLIHDDSLTFKEDIQKAQVSGQGDSLHEHIANLAGSPAIKKGILQTVKVVDELVKVMGRHKPENIVI
EMARENQTTQKGQKNSRERMKRIEEGIKELGSQILKEHPVENTQLQNEKLYLYYLQNGRMYVDQELDI
NRLSDYDVDHIVPQSFLKDDSIDNKVLTRSDKNRGKSDNVPSEEVVKKMKNYWRQLLNAKLITQRKFIDNL
TKAERGGLSELDKAGFIKRQLVETRQITKHVAQILDSRMNTKYDENDKLIREVKVITLKSKLVSDFRKDFQF
YKVREINNYHHAHDAYLNAVVGTALIKKYPKLESEFVYGDYKVYDVRKMIAKSEQEIGKATAKYFFYSNIM
NFFKTEITLANGEIRKRPLIETNGETGEIVWDKGRDFATVRKVLSMPQVNIVKKTEVQTGGFSKESILPKRN
SDKLIARKKDWDPKKYGGFDSFTVAYSVLVVAKVEKGKSKKLKSVKELLGITIMERSSFEKNPIDFLEAKG
YKEVKKDLIIKLPKYSLFELENGRKRMLASAGELQKGNELALPSKYVNFLYLASHYEKLKGSPEDNEQKQL
FVEQHKHYLDEIIEQISEFSKRVILADANLDKVLSAYNKHRDKPIREQAENIIHLFTLTNLGAPAAFKYFDTTI
DRKRYTSTKEVLDATLIHQSITGLYETRIDLSQLGGDSGGSTNLSDIIEKETGKQLVIQESILMLPEEVEEVIG
NKPESDILVHTAYDESTDENVMLLTSDAPEYKPWALVIQDSNGENKIKMLSGGSPKKKRKV

[0292] In some embodiments, any of the fusion proteins provided herein comprise a second UGI domain. In some embodiments, the second UGI domain comprises a wild-type UGI or a UGI as set forth in SEQ ID NO: 115-120. In some embodiments, the UGI proteins provided herein include fragments of UGI and proteins homologous to a UGI or a UGI fragment. For example, in some embodiments, the second UGI domain comprises a fragment of the amino acid sequence set forth in SEQ ID NO: 115. In some embodiments, a UGI fragment comprises an amino acid sequence that comprises at least 60%, at least 65%, at least 70%, at least 75%, at least 80%, at least 85%, at least 90%, at least 95%, at least 96%, at least 97%, at least 98%, at least 99%, or at least 99.5% of the amino acid sequence as set forth in SEQ ID NO: 115. In some embodiments, the second UGI domain comprises an amino acid sequence homologous to the amino acid sequence set forth in SEQ ID NO: 115 or an amino acid sequence homologous to a fragment of the amino acid sequence set forth in SEQ ID NO: 115. In some embodiments, proteins comprising UGI or fragments of UGI or homologs of UGI or UGI fragments are referred to as “UGI variants.” A UGI variant shares homology to UGI, or a fragment thereof. For example a UGI variant is at least 70% identical, at least 75% identical, at least 80% identical, at least 85% identical, at least 90% identical, at least 95% identical, at least 96% identical, at least 97% identical, at least 98% identical, at least 99% identical, at least 99.5% identical, or at least 99.9% identical to a wild type UGI or a UGI as set forth in SEQ ID NO: 39. In some embodiments, the UGI variant comprises a fragment of UGI, such that the fragment is at least 70% identical, at least 80% identical, at least 90% identical, at least 95% identical, at least 96% identical, at least 97% identical, at least 98% identical, at least 99% identical, at least 99.5% identical, or at least 99.9% to the corresponding fragment of wild-type UGI or a UGI as set forth in SEQ ID NO: 115.

[0293] In some embodiments, the fusion protein comprises the amino acid sequence of any one of SEQ ID NOs: 122-132. In some embodiments, the fusion protein comprises the amino acid sequence of SEQ ID NO: 122. In some embodiments, the fusion protein consists of the amino acid sequence of SEQ ID NO: 123. In some embodiments, the fusion protein comprises the amino acid sequence of SEQ ID NO: 124. In some embodiments, the fusion protein consists of the amino acid sequence of SEQ ID NO: 125. In some embodiments, the fusion protein comprises the amino acid sequence of SEQ ID NO: 126. In some embodiments, the fusion protein consists of the amino acid sequence of SEQ ID NO: 127. In some embodiments, the fusion protein comprises an amino acid sequence that is at least 70%, at least 75%, at least 80%, at least 85%, at least 90%, at least 95%, at least 96%, at least 97%, at least 98%, at least 99%, or at least 99.5% identical to the amino acid sequence as set forth in SEQ ID NOs: 56-61. In some embodiments, the Cas9 domain is replaced with any of the Cas9 domains comprising one or more mutations provided herein.

xCas9 3.6-BE4 (APOBEC 1-linker(32aa)-xCas9(3.6)n-linker(9aa)-UGI-linker(9aa)-UGI):
(SEQ ID NO: 133)
MSSETGPVAVDPTLRRRIEPHEFEVFFDPRELRKETCLLYEINWGGRHSIWRHTSQNTNKHVEVNFIE
KFTTERYFCPNTRCSITWFLSWSPCGECSRAITEFLSRYPHVTLFIYIARLYHHADPRNRQGLRDLIS
SGVTIQIMTEQESGYCWRNFVNYSPSNEAHWPRYPHLWVRLYVLELYCIILGLPPCLNILRRKQPQLT
FFTIALQSCHYQRLPPHILWATGLKSGGSSGGSSGSETPGTSESATPESSGGSSGGSDKKYSIGLAIG
TNSVGWAVITDEYKVPSKKFKVLGNTDRHSIKKNLIGALLFDSGETAEATRLKRTARRRYTRRKNRIC
YLQEIFSNEMAKVDDSFFHRLEESFLVGEDKKHERHPIFGNIVDEVAYHEKYPTIYHLRKKLVDSTDK
ADLRLIYLALAHMIKFRGHFLIEGDLNPDNSDVDKLFIQLVQTYNQLFEENPINASGVDAKAILSARL
AKSRRLENLIAQLPGEKKNGLFGNLIALSLGLTPNFKSNFDLAEDTKLQLSKDTYDDDLDNLLAQIGD
QYADLFLAAKNLSDAILLSDILRVNTEITKAPLSASMIKRYDEHHQDLTLLKALVRQQLPEKYKEIFF
DQSKNGYAGYIDGGASQEEFYKFIKPILEKMDGTEELLVKLNREDLLRKQRTFDNGIIPHQIHLGELH
AILRRQEDFYPFLKDNREKIEKILTFRIPYYVGPLARGNSRFAWMTRKSEETITPWNFEKVVDKGASA
QSFIERMTNFDKNLPNEKVLPKHSLLYEYFTVYNELTKVKYVTEGMRKPAFLSGDQKKAIVDLLFKTN
RKVTVKQLKEDYFKKIECFDSVEISGVEDRFNASLGTYHDLLKIIKDKDFLDNEENEDILEDIVLTLT
LFEDREMIEERLKTYAHLFDDKVMKQLKRRRYTGWGRLSRKLINGIRDKQSGKTILDFLKSDGFANRN
FIQLIHDDSLTFKEDIQKAQVSGQGDSLHEHIANLAGSPAIKKGILQTVKVVDELVKVMGRHKPENIV
IEMARENQTTQKGQKNSRERMKRIEEGIKELGSQILKEHPVENTQLQNEKLYLYYLQNGRDMYVDQEL
DINRLSDYDVDHIVPQSFLKDDSIDNKVLTRSDKNRGKSDNVPSEEVVKKMKNYWRQLLNAKLITQRK
FDNLTKAERGGLSELDKAGFIKRQLVETRQITKHVAQILDSRMNTKYDENDKLIREVKVITLKSKLVS
DFRKDFQFYKVREINNYHHAHDAYLNAVVGTALIKKYPKLESEFVYGDYKVYDVRKMIAKSEQEIGKA
TAKYFFYSNIMNFFKTEITLANGEIRKRPLIETNGETGEIVWDKGRDFATVRKVLSMPQVNIVKKTEV
QTGGFSKESILPKRNSDKLIARKKDWDPKKYGGFDSPTVAYSVLVVAKVEKGKSKKLKSVKELLGITI
MERSSFEKNPIDFLEAKGYKEVKKDLIIKLPKYSLFELENGRKRMLASAGVLQKGNELALPSKYVNFL
YLASHYEKLKGSPEDNEQKQLFVEQHKHYLDEIIEQISEFSKRVILADANLDKVLSAYNKHRDKPIRE
QAENIIHLFTLTNLGAPAAFKYFDTTIDRKRYTSTKEVLDATLIHQSITGLYETRIDISQLGGDSGGS
GGSGGSTNLSDIIEKETGKQLVIQESILMLPEEVEEVIGNKPESDILVHTAYDESTDENVMLLTSDAP
EYKPWALVIQDSNGENKIKMLSGGSGGSGGSTNLSDIIEKETGKQLVIQESILMLPEEVEEVIGNKPE
SDILVHTAYDESTDENVMLLTSDAPEYKPWALVIQDSNGENKIKMLSGGSPKKKRK
xCas9 3.7-BE4 (APOBEC1-linker(32aa)-xCas9(3.7)n-linker(9aa)-UGI-linker(9aa)-UGI):
(SEQ ID NO: 125)
MSSETGPVAVDPTLRRRIEPHEFEVFFDPRELRKETCLLYEINWGGRHSIWRHTSQNTNKHVEVNFIE
KFTTERYFCPNTRCSITWFLSWSPCGECSRAITEFLSRYPHVTLFIYIARLYHHADPRNRQGLRDLIS
SGVTIQIMTEQESGYCWRNFVNYSPSNEAHWPRYPHLWVRLYVLELYCIILGLPPCLNILRRKQPQLT
FFTIALQSCHYQRLPPHILWATGLKSGGSSGGSSGSETPGTSESATPESSGGSSGGSDKKYSIGLAIG
TNSVGWAVITDEYKVPSKKFKVLGNTDRHSIKKNLIGALLFDSGETAEATRLKRTARRRYTRRKNRIC
YLQEIFSNEMAKVDDSFFHRLEESFLVEEDKKHERHPIFGNIVDEVAYHEKYPTIYHLRKKLVDSTDK
ADLRLIYLALAHMIKFRGHFLIEGDLNPDNSDVDKLFIQLVQTYNQLFEENPINASGVDAKAILSARL
SKSRRLENLIAQLPGEKKNGLFGNLIALSLGLTPNFKSNFDLAEDTKLQLSKDTYDDDLDNLLAQIGD
QYADLFLAAKNLSDAILLSDILRVNTEITKAPLSASMIKLYDEHHQDLTLLKALVRQQLPEKYKEIFF
DQSKNGYAGYIDGGASQEEFYKFIKPILEKMDGTEELLVKLNREDLLRKQRTFDNGIIPHQIHLGELH
AILRRQEDFYPFLKDNREKIEKILTFRIPYYVGPLARGNSRFAWMTRKSEETITPWNFEKVVDKGASA
QSFIERMTNFDKNLPNEKVLPKHSLLYEYFTVYNELTKVKYVTEGMRKPAFLSGDQKKAIVDLLFKTN
RKVTVKQLKEDYFKKIECFDSVEISGVEDRFNASLGTYHDLLKIIKDKDFLDNEENEDILEDIVLTLT
LFEDREMIEERLKTYAHLFDDKVMKQLKRRRYTGWGRLSRKLINGIRDKQSGKTILDFLKSDGFANRN
FIQLIHDDSLTFKEDIQKAQVSGQGDSLHEHIANLAGSPAIKKGILQTVKVVDELVKVMGRHKPENIV
IEMARENQTTQKGQKNSRERMKRIEEGIKELGSQILKEHPVENTQLQNEKLYLYYLQNGRDMYVDQEL
DINRLSDYDVDHIVPQSFLKDDSIDNKVLTRSDKNRGKSDNVPSEEVVKKMKNYWRQLLNAKLITQRK
FDNLTKAERGGLSELDKAGFIKRQLVETRQITKHVAQILDSRMNTKYDENDKLIREVKVITLKSKLVS
DFRKDFQFYKVREINNYHHAHDAYLNAVVGTALIKKYPKLESEFVYGDYKVYDVRKMIAKSEQEIGKA
TAKYFFYSNIMNFFKTEITLANGEIRKRPLIETNGETGEIVWDKGRDFATVRKVLSMPQVNIVKKTEV
QTGGFSKESILPKRNSDKLIARKKDWDPKKYGGFDSPTVAYSVLVVAKVEKGKSKKLKSVKELLGITI
MERSSFEKNPIDFLEAKGYKEVKKDLIIKLPKYSLFELENGRKRMLASAGVLQKGNELALPSKYVNFL
YLASHYEKLKGSPEDNEQKQLFVEQHKHYLDEIIEQISEFSKRVILADANLDKVLSAYNKHRDKPIRE
QAENIIHLFTLTNLGAPAAFKYFDTTIDRKRYTSTKEVLDATLIHQSITGLYETRIDLSQLGGDSGGS
GGSGGSTNLSDIIEKETGKQLVIQESILMLPEEVEEVIGNKPESDILVHTAYDESTDENVMLLTSDAP
EYKPWALVIQDSNGENKIKMLSGGSGGSGGSTNLSDIIEKETGKQLVIQESILMLPEEVEEVIGNKPE
SDILVHTAYDESTDENVMLLTSDAPEYKPWALVIQDSNGENKIKMLSGGSPKKKRK
BE4:
(SEQ ID NO: 130)
MSSETGPVAVDPTLRRRIEPHEFEVFFDPRELRKETCLLYEINWGGRHSIWRHTSQNTNKHVEVNFIE
KFTTERYFCPNTRCSITWFLSWSPCGECSRAITEFLSRYPHVTLFIYIARLYHHADPRNRQGLRDLIS
SGVTIQIMTEQESGYCWRNFVNYSPSNEAHWPRYPHLWVRLYVLELYCIILGLPPCLNILRRKQPQLT
FFTIALQSCHYQRLPPHILWATGLKSGGSSGGSSGSETPGTSESATPESSGGSSGGSDKKYSIGLAIG
TNSVGWAVITDEYKVPSKKFKVLGNTDRHSIKKNLIGALLFDSGETAEATRLKRTARRRYTRRKNRIC
YLQEIFSNEMAKVDDSFFHRLEESFLVEEDKKHERHPIFGNIVDEVAYHEKYPTIYHLRKKLVDSTDK
ADLRLIYLALAHMIKFRGHFLIEGDLNPDNSDVDKLFIQLVQTYNQLFEENPINASGVDAKAILSARL
SKSRRLENLIAQLPGEKKNGLFGNLIALSLGLTPNFKSNFDLAEDAKLQLSKDTYDDDLDNLLAQIGD
QYADLFLAAKNLSDAILLSDILRVNTEITKAPLSASMIKRYDEHHQDLTLLKALVRQQLPEKYKEIFF
DQSKNGYAGYIDGGASQEEFYKFIKPILEKMDGTEELLVKLNREDLLRKQRTFDNGSIPHQIHLGELH
AILRRQEDFYPFLKDNREKIEKILTFRIPYYVGPLARGNSRFAWMTRKSEETITPWNFEEVVDKGASA
QSFIERMTNFDKNLPNEKVLPKHSLLYEYFTVYNELTKVKYVTEGMRKPAFLSGEQKKAIVDLLFKTN
RKVTVKQLKEDYFKKIECFDSVEISGVEDRFNASLGTYHDLLKIIKDKDFLDNEENEDILEDIVLTLT
LFEDREMIEERLKTYAHLFDDKVMKQLKRRRYTGWGRLSRKLINGIRDKQSGKTILDFLKSDGFANRN
FMQLIHDDSLTFKEDIQKAQVSGQGDSLHEHIANLAGSPAIKKGILQTVKVVDELVKVMGRHKPENIV
IEMARENQTTQKGQKNSRERMKRIEEGIKELGSQILKEHPVENTQLQNEKLYLYYLQNGRDMYVDQEL
DINRLSDYDVDHIVPQSFLKDDSIDNKVLTRSDKNRGKSDNVPSEEVVKKMKNYWRQLLNAKLITQRK
FDNLTKAERGGLSELDKAGFIKRQLVETRQITKHVAQILDSRMNTKYDENDKLIREVKVITLKSKLVS
DFRKDFQFYKVREINNYHHAHDAYLNAVVGTALIKKYPKLESEFVYGDYKVYDVRKMIAKSEQEIGKA
TAKYFFYSNIMNFFKTEITLANGEIRKRPLIETNGETGEIVWDKGRDFATVRKVLSMPQVNIVKKTEV
QTGGFSKESILPKRNSDKLIARKKDWDPKKYGGFDSPTVAYSVLVVAKVEKGKSKKLKSVKELLGITI
MERSSFEKNPIDFLEAKGYKEVKKDLIIKLPKYSLFELENGRKRMLASAGELQKGNELALPSKYVNFL
YLASHYEKLKGSPEDNEQKQLFVEQHKHYLDEIIEQISEFSKRVILADANLDKVLSAYNKHRDKPIRE
QAENIIHLFTLTNLGAPAAFKYFDTTIDRKRYTSTKEVLDATLIHQSITGLYETRIDLSQLGGDSGGS
GGSGGSTNLSDIIEKETGKQLVIQESILMLPEEVEEVIGNKPESDILVHTAYDESTDENVMLLTSDAP
EYKPWALVIQDSNGENKIKMLSGGSGGSGGSTNLSDIIEKETGKQLVIQESILMLPEEVEEVIGNKPE
SDILVHTAYDESTDENVMLLTSDAPEYKPWALVIQDSNGENKIKMLSGGSPKKKRK

[0294] In some embodiments, any of the fusion proteins provided herein may further comprise a Gam protein. The term “Gam protein,” as used herein, refers generally to proteins capable of binding to one or more ends of a double strand break of a double stranded nucleic acid (e.g., double stranded DNA). In some embodiments, the Gam protein prevents or inhibits degradation of one or more strands of a nucleic acid at the site of the double strand break. In some embodiments, a Gam protein is a naturally-occurring Gam protein from bacteriophage Mu, or a non-naturally occurring variant thereof. Fusion proteins comprising Gam proteins are described in Komor et al. (2017) Improved Base Excision Repair Inhibition and Bateriophage Mu Gam Protein Yields C:G-to-T:A base editors with higher efficiency and product purity. Sci Adv, 3: eaao4774; the entire contents of which is incorporated by reference herein. In some embodiments, the Gam protein comprises an amino acid sequence that is at least 70%, at least 75%, at least 80%, at least 85%, at least 90%, at least 92%, at least 95%, at least 96%, at least 97%, at least 98%, at least 99%, or at least 99.5% identical to the amino acid sequence provided by SEQ ID NO: 121. In some embodiments, the Gam protein comprises the amino acid sequence of SEQ ID NO: 121. In some embodiments, the fusion protein (e.g., BE4-Gam of SEQ ID NO: 126) comprises a Gam protein, wherein the Cas9 domain of BE4 is replaced with any of the Cas9 domains provided herein.

Gam from bacteriophage Mu:
(SEQ ID NO: 121)
AKPAKRIKSAAAAYVPQNRDAVITDIKRIGDLQREASRLETEMNDAIAEITEKFAARIAPIKTDIETL
SKGVQGWCEANRDELTNGGKVKTANLVTGDVSWRVRPPSVSIRGMDAVMETLERLGLQRFIRTKQEIN
KEAILLEPKAVAGVAGITVKSGIEDFSIIPFEQEAGI
BE4-Gam:
(SEQ ID NO: 126)
MAKPAKRIKSAAAAYVPQNRDAVITDIKRIGDLQREASRLETEMNDAIAEITEKFAARIAPIKTDIET
LSKGVQGWCEANRDELTNGGKVKTANLVTGDVSWRVRPPSVSIRGMDAVMETLERLGLQRFIRTKQEI
NKEAILLEPKAVAGVAGITVKSGIEDFSIIPFEQEAGISGSETPGTSESATPESSSETGPVAVDPTLR
RRIEPHEFEVFFDPRELRKETCLLYEINWGGRHSIWRHTSQNTNKHVEVNFIEKFTTERYFCPNTRCS
ITWFLSWSPCGECSRAITEFLSRYPHVTLFIYIARLYHHADPRNRQGLRDLISSGVTIQIMTEQESGY
CWRNFVNYSPSNEAHWPRYPHLWVRLYVLELYCIILGLPPCLNILRRKQPQLTFFTIALQSCHYQRLP
PHILWATGLKSGGSSGGSSGSETPGTSESATPESSGGSSGGSDKKYSIGLAIGTNSVGWAVITDEYKV
PSKKFKVLGNTDRHSIKKNLIGALLFDSGETAEATRLKRTARRRYTRRKNRICYLQEIFSNEMAKVDD
SFFHRLEESFLVEEDKKHERHPIFGNIVDEVAYHEKYPTIYHLRKKLVDSTDKADLRLIYLALAHMIK
FRGHFLIEGDLNPDNSDVDKLFIQLVQTYNQLFEENPINASGVDAKAILSARLSKSRRLENLIAQLPG
EKKNGLFGNLIALSLGLTPNFKSNFDLAEDAKLQLSKDTYDDDLDNLLAQIGDQYADLFLAAKNLSDA
ILLSDILRVNTEITKAPLSASMIKRYDEHHQDLTLLKALVRQQLPEKYKEIFFDQSKNGYAGYIDGGA
SQEEFYKFIKPILEKMDGTEELLVKLNREDLLRKQRTFDNGSIPHQIHLGELHAILRRQEDFYPFLKD
NREKIEKILTFRIPYYVGPLARGNSRFAWMTRKSEETITPWNFEEVVDKGASAQSFIERMTNFDKNLP
NEKVLPKHSLLYEYFTVYNELTKVKYVTEGMRKPAFLSGEQKKAIVDLLFKTNRKVTVKQLKEDYFKK
IECFDSVEISGVEDRFNASLGTYHDLLKIIKDKDFLDNEENEDILEDIVLTLTLFEDREMIEERLKTY
AHLFDDKVMKQLKRRRYTGWGRLSRKLINGIRDKQSGKTILDFLKSDGFANRNFMQLIHDDSLTFKED
IQKAQVSGQGDSLHEHIANLAGSPAIKKGILQTVKVVDELVKVMGRHKPENIVIEMARENQTTQKGQK
NSRERMKRIEEGIKELGSQILKEHPVENTQLQNEKLYLYYLQNGRDMYVDQELDINRLSDYDVDHIVP
QSFLKDDSIDNKVLTRSDKNRGKSDNVPSEEVVKKMKNYWRQLLNAKLITQRKFDNLTKAERGGLSEL
DKAGFIKRQLVETRQITKHVAQILDSRMNTKYDENDKLIREVKVITLKSKLVSDFRKDFQFYKVREIN
NYHHAHDAYLNAVVGTALIKKYPKLESEFVYGDYKVYDVRKMIAKSEQEIGKATAKYFFYSNIMNFFK
TEITLANGEIRKRPLIETNGETGEIVWDKGRDFATVRKVLSMPQVNIVKKTEVQTGGFSKESILPKRN
SDKLIARKKDWDPKKYGGFDSPTVAYSVLVVAKVEKGKSKKLKSVKELLGITIMERSSFEKNPIDFLE
AKGYKEVKKDLIIKLPKYSLFELENGRKRMLASAGELQKGNELALPSKYVNFLYLASHYEKLKGSPED
NEQKQLFVEQHKHYLDEIIEQISEFSKRVILADANLDKVLSAYNKHRDKPIREQAENIIHLFTLTNLG
APAAFKYFDTTIDRKRYTSTKEVLDATLIHQSITGLYETRIDLSQLGGDSGGSGGSGGSTNLSDIIEK
ETGKQLVIQESILMLPEEVEEVIGNKPESDILVHTAYDESTDENVMLLTSDAPEYKPWALVIQDSNGE
NKIKMLSGGSGGSGGSTNLSDIIEKETGKQLVIQESILMLPEEVEEVIGNKPESDILVHTAYDESTDE
NVMLLTSDAPEYKPWALVIQDSNGENKIKMLSGGSPKKKRK

[0295] Some aspects of the disclosure provide fusion proteins comprising a nucleic acid Cas9 domain (e.g.,) and an adenosine deaminase. In some embodiments, any of the fusion proteins provided herein are base editors. Some aspects of the disclosure provide fusion proteins comprising a Cas9 domain and an adenosine deaminase. The Cas9 domain may be any of the Cas9 domains (e.g., a Cas9 domain) provided herein. In some embodiments, any of the Cas9 domains (e.g., a Cas9 domain) provided herein may be fused with any of the adenosine deaminases provided herein. In some embodiments, the fusion protein comprises the structure:

[NH₂]-[adenosine deaminase]-[Cas9]-[COOH]; or
[NH₂]-[Cas9]-[adenosine deaminase]-[COOH].

[0296] In some embodiments, the fusion proteins comprising an adenosine deaminase and a Cas9 domain do not include a linker sequence. In some embodiments, a linker is present between the adenosine deaminase domain and the Cas9 domain. In some embodiments, the “-” used in the general architecture above indicates the presence of an optional linker. In some embodiments, the adenosine deaminase and the Cas9 domain are fused via any of the linkers provided herein. For example, in some embodiments the adenosine deaminase and the Cas9 domain are fused via any of the linkers provided below. In some embodiments, the linker comprises the amino acid sequence of any one of SEQ ID NOs: 89-112. In some embodiments, the adenosine deaminase and the Cas9 domain are fused via a linker that comprises between 1 and 200 amino acids. In some embodiments, the adenosine deaminase and the Cas9 domain are fused via a linker that comprises from 1 to 5, 1 to 10, 1 to 20, 1 to 30, 1 to 40, 1 to 50, 1 to 60, 1 to 80, 1 to 100, 1 to 150, 1 to 200, 5 to 10, 5 to 20, 5 to 30, 5 to 40, 5 to 60, 5 to 80, 5 to 100, 5 to 150, 5 to 200, 10 to 20, 10 to 30, 10 to 40, 10 to 50, 10 to 60, 10 to 80, 10 to 100, 10 to 150, 10 to 200, 20 to 30, 20 to 40, 20 to 50, 20 to 60, 20 to 80, 20 to 100, 20 to 150, 20 to 200, 30 to 40, 30 to 50, 30 to 60, 30 to 80, 30 to 100, 30 to 150, 30 to 200, 40 to 50, 40 to 60, 40 to 80, 40 to 100, 40 to 150, 40 to 200, 50 to 60 50 to 80, 50 to 100, 50 to 150, 50 to 200, 60 to 80, 60 to 100, 60 to 150, 60 to 200, 80 to 100, 80 to 150, 80 to 200, 100 to 150, 100 to 200, or 150 to 200 amino acids in length. In some embodiments, the adenosine deaminase and the Cas9 domain are fused via a linker that comprises 3, 4, 16, 24, 32, 64, 100, or 104 amino acids in length. In some embodiments, the adenosine deaminase and the Cas9 domain are fused via a linker that comprises the amino acid sequence SGSETPGTSESATPES (SEQ ID NO: 89), SGGSSGGSSGSETPGTSESATPESSGGSSGGS (SEQ ID NO: 106), or GGSGGSPGSPAGSPTSTEEGTSESATPESGPGTSTEPSEGSAPGSPAGSPTSTEEGTSTEPSEGSAP GTSTEPSEGSAPGTSESATPESGPGSEPATSGGSGGS (SEQ ID NO: 110). In some embodiments, the adenosine deaminase and the Cas9 domain are fused via a linker comprising the amino acid sequence SGSETPGTSESATPES (SEQ ID NO: 89), which may also be referred to as the XTEN linker. In some embodiments, the linker is 24 amino acids in length. In some embodiments, the linker comprises the amino acid sequence SGGSSGGSSGSETPGTSESATPES (SEQ ID NO: 111). In some embodiments, the linker is 32 amino acids in length. In some embodiments, the linker comprises the amino acid sequence (SGGS)2-SGSETPGTSESATPES-(SGGS)2 (SEQ ID NO: 96), which may also be referred to as (SGGS)2-XTEN-(SGGS)2. In some embodiments, the linker comprises the amino acid sequence (SGGS)n-SGSETPGTSESATPES-(SGGS)n (SEQ ID NO: 98), wherein n is 0, 1, 2, 3, 4, 5, 6, 7, 8, 9, or 10. In some embodiments, the linker is 40 amino acids in length. In some embodiments, the linker comprises the amino acid sequence SGGSSGGSSGSETPGTSESATPESSGGSSGGSSGGSSGGS (SEQ ID NO: 106). In some embodiments, the linker is 64 amino acids in length. In some embodiments, the linker comprises the amino acid sequence SGGSSGGSSGSETPGTSESATPESSGGSSGGSSGGSSGGSSGSETPGTSESATPESSGGSSGGS (SEQ ID NO: 107). In some embodiments, the linker is 92 amino acids in length. In some embodiments, the linker comprises the amino acid sequence

(SEQ ID NO: 108)
PGSPAGSPTSTEEGTSESATPESGPGTSTEPSEGSAPGSPAGSPTSTEEGT
STEPSEGSAPGTSTEPSEGSAPGTSESATPESGPGSEPATS.

[0297] In some embodiments, the fusion proteins comprise one or more adenosine deaminases defined herein, or to any amino acid sequence that is at least 60%, at least 65%, at least 70%, at least 75%, at least 80%, at least 85%, at least 90%, at least 95%, at least 96%, at least 97%, at least 98%, at least 99%, or at least 99.5% identical to any one of the amino acid sequences set forth herein.

[0298] In some embodiments, the fusion proteins comprising an adenosine deaminase provided herein further comprise one or more nuclear targeting sequences, for example, a nuclear localization sequence (NLS). In some embodiments, a NLS comprises an amino acid sequence that facilitates the importation of a protein, that comprises an NLS, into the cell nucleus (e.g., by nuclear transport). In some embodiments, any of the fusion proteins provided herein further comprise a nuclear localization sequence (NLS). In some embodiments, the NLS is fused to the N-terminus of the fusion protein. In some embodiments, the NLS is fused to the C-terminus of the fusion protein. In some embodiments, the NLS is fused to the N-terminus of the IBR (e.g., dISN). In some embodiments, the NLS is fused to the C-terminus of the IBR (e.g., dISN). In some embodiments, the NLS is fused to the N-terminus of the Cas9 domain. In some embodiments, the NLS is fused to the C-terminus of the Cas9 domain. In some embodiments, the NLS is fused to the N-terminus of the adenosine deaminase. In some embodiments, the NLS is fused to the C-terminus of the adenosine deaminase. In some embodiments, the NLS is fused to the fusion protein via one or more linkers. In some embodiments, the NLS is fused to the fusion protein without a linker. In some embodiments, the NLS comprises an amino acid sequence of any one of the NLS sequences provided or referenced herein. In some embodiments, the NLS comprises an amino acid sequence as set forth in SEQ ID NO: 37 or SEQ ID NO: 38. Additional nuclear localization sequences are known in the art and would be apparent to the skilled artisan. For example, NLS sequences are described in Plank et al., PCT/EP2000/011690, the contents of which are incorporated herein by reference for their disclosure of exemplary nuclear localization sequences. In some embodiments, a NLS comprises the amino acid sequence PKKKRKV (SEQ ID NO: 113). In some embodiments, a NLS comprises the amino acid sequence MDSLLMNRRKFLYQFKNVRWAKGRRETYLC (SEQ ID NO: 114).

[0299] In some embodiments, the general architecture of exemplary fusion proteins with an adenosine deaminase and a Cas9 domain comprises any one of the following structures, where NLS is a nuclear localization sequence (e.g., any NLS provided herein), NH₂ is the N-terminus of the fusion protein, and COOH is the C-terminus of the fusion protein. Fusion proteins comprising an adenosine deaminase, a napDNAbp, and a NLS:

NH₂-[NLS]-[adenosine deaminase]-[Cas9]-COOH;
NH₂-[adenosine deaminase]-[NLS]-[Cas9]-COOH;
NH₂-[adenosine deaminase]-[Cas9]-[NLS]-COOH;
NH₂-[NLS]-[Cas9]-[adenosine deaminase]-COOH;
NH₂-[Cas9]-[NLS]-[adenosine deaminase]-COOH; and
NH₂-[Cas9]-[adenosine deaminase]-[NLS]-COOH.

[0300] In some embodiments, the fusion proteins comprising an adenosine deaminase domain provided herein do not comprise a linker. In some embodiments, a linker is present between one or more of the domains or proteins (e.g., adenosine deaminase, Cas9 domain, and/or NLS). In some embodiments, the “-” used in the general architecture above indicates the presence of an optional linker.

[0301] Some aspects of the disclosure provide fusion proteins that comprise a Cas9 domain (e.g. a Cas9 domain) and at least two adenosine deaminase domains. Without wishing to be bound by any particular theory, dimerization of adenosine deaminases (e.g., in cis or in trans) may improve the ability (e.g., efficiency) of the fusion protein to modify a nucleic acid base, for example to deaminate adenine. In some embodiments, any of the fusion proteins may comprise 2, 3, 4 or 5 adenosine deaminase domains. In some embodiments, any of the fusion proteins provided herein comprise two adenosine deaminases. In some embodiments, any of the fusion proteins provided herein contain only two adenosine deaminases. In some embodiments, the adenosine deaminases are the same. In some embodiments, the adenosine deaminases are any of the adenosine deaminases provided herein. In some embodiments, the adenosine deaminases are different. In some embodiments, the first adenosine deaminase is any of the adenosine deaminases provided herein, and the second adenosine is any of the adenosine deaminases provided herein, but is not identical to the first adenosine deaminase. Additional fusion protein constructs comprising two adenosine deaminase domains suitable for use herein are illustrated in Gaudelli et al. (2017) Programmable base editing of A⋅T to G⋅C in genomic DNA without DNA cleavage, Nature, 551(23); 464-471; the entire contents of which is incorporated herein by reference.

[0302] In some embodiments, the first adenosine deaminase and the second deaminase are fused directly or via a linker. In some embodiments, the linker is any of the linkers provided herein. In some embodiments, the linker comprises the amino acid sequence of any one of the linker sequences disclosed herein (e.g., linkers of SEQ ID NOs: 21-36, 64, 65, 66, or 67). In some embodiments, the first adenosine deaminase is the same as the second adenosine deaminase. In some embodiments, the first adenosine deaminase and the second adenosine deaminase are any of the adenosine deaminases described herein. In some embodiments, the first adenosine deaminase and the second adenosine deaminase are different. In some embodiments, the first adenosine deaminase is any of the adenosine deaminases provided herein. In some embodiments, the second adenosine deaminase is any of the adenosine deaminases provided herein but is not identical to the first adenosine deaminase. In some embodiments, the first adenosine deaminase is an ecTadA adenosine deaminase. In some embodiments, the first adenosine deaminase comprises an amino acid sequence that is at least 60%, at least 65%, at least 70%, at least 75%, at least 80%, at least 85%, at least 90%, at least 95%, at least 96%, at least 97%, at least 98%, at least 99%, or at least 99.5% identical to any one of the amino acid sequences set forth herein.

[0303] In some embodiments, the general architecture of exemplary fusion proteins with a first adenosine deaminase, a second adenosine deaminase, and a Cas9 domain (e.g.) comprises any one of the following structures, where NLS is a nuclear localization sequence (e.g., any NLS provided herein), NH₂ is the N-terminus of the fusion protein, and COOH is the C-terminus of the fusion protein:

NH₂-[first adenosine deaminase]-[second adenosine deaminase]-[Cas9]-COOH;
NH₂-[first adenosine deaminase]-[Cas9]-[second adenosine deaminase]-COOH;
NH₂-[Cas9]-[first adenosine deaminase]-[second adenosine deaminase]-COOH;
NH₂-[second adenosine deaminase]-[first adenosine deaminase]-[Cas9]-COOH;
NH₂-[second adenosine deaminase]-[Cas9]-[first adenosine deaminase]-COOH;
NH₂-[Cas9]-[second adenosine deaminase]-[first adenosine deaminase]-COOH;

[0304] In some embodiments, the fusion proteins provided herein do not comprise a linker. In some embodiments, a linker is present between one or more of the domains or proteins (e.g., first adenosine deaminase, second adenosine deaminase, and/or napDNAbp). In some embodiments, the “-” used in the general architecture above indicates the presence of an optional linker.

[0305] In some embodiments, a fusion protein comprising a first adenosine deaminase, a second adenosine deaminase, and a Cas9 domain further comprise a NLS. Exemplary fusion proteins comprising a first adenosine deaminase, a second adenosine deaminase, a napDNAbp, and an NLS are shown as follows:

NH₂-[NLS]-[first adenosine deaminase]-[second adenosine deaminase]-[Cas9]-COOH;
NH₂-[first adenosine deaminase]-[NLS]-[second adenosine deaminase]-[Cas9]-COOH;
NH₂-[first adenosine deaminase]-[second adenosine deaminase]-[NLS]-[Cas9]-COOH;
NH₂-[first adenosine deaminase]-[second adenosine deaminase]-[Cas9]-[NLS]-COOH;
NH₂-[NLS]-[first adenosine deaminase]-[Cas9]-[second adenosine deaminase]-COOH;
NH₂-[first adenosine deaminase]-[NLS]-[Cas9]-[second adenosine deaminase]-COOH;
NH₂-[first adenosine deaminase]-[Cas9]-[NLS]-[second adenosine deaminase]-COOH;
NH₂-[first adenosine deaminase]-[Cas9]-[second adenosine deaminase]-[NLS]-COOH;
NH₂-[NLS]-[Cas9]-[first adenosine deaminase]-[second adenosine deaminase]-COOH;
NH₂-[Cas9]-[NLS]-[first adenosine deaminase]-[second adenosine deaminase]-COOH;
NH₂-[Cas9]-[first adenosine deaminase]-[NLS]-[second adenosine deaminase]-COOH;
NH₂-[Cas9]-[first adenosine deaminase]-[second adenosine deaminase]-[NLS]-COOH;
NH₂-[NLS]-[second adenosine deaminase]-[first adenosine deaminase]-[Cas9]-COOH;
NH₂-[second adenosine deaminase]-[NLS]-[first adenosine deaminase]-[Cas9]-COOH;
NH₂-[second adenosine deaminase]-[first adenosine deaminase]-[NLS]-[Cas9]-COOH;
NH₂-[second adenosine deaminase]-[first adenosine deaminase]-[Cas9]-[NLS]-COOH;
NH₂-[NLS]-[second adenosine deaminase]-[Cas9]-[first adenosine deaminase]-COOH;
NH₂-[second adenosine deaminase]-[NLS]-[Cas9]-[first adenosine deaminase]-COOH;
NH₂-[second adenosine deaminase]-[Cas9]-[NLS]-[first adenosine deaminase]-COOH;
NH₂-[second adenosine deaminase]-[Cas9]-[first adenosine deaminase]-[NLS]-COOH;
NH₂-[NLS]-[Cas9]-[second adenosine deaminase]-[first adenosine deaminase]-COOH;
NH₂-[Cas9]-[NLS]-[second adenosine deaminase]-[first adenosine deaminase]-COOH;
NH₂-[Cas9]-[second adenosine deaminase]-[NLS]-[first adenosine deaminase]-COOH;
NH₂-[Cas9]-[second adenosine deaminase]-[first adenosine deaminase]-[NLS]-COOH;

[0306] In some embodiments, the fusion proteins provided herein do not comprise a linker. In some embodiments, a linker is present between one or more of the domains or proteins (e.g., first adenosine deaminase, second adenosine deaminase, Cas9 domain, and/or NLS). In some embodiments, the “-” used in the general architecture above indicates the presence of an optional linker.

[0307] In some embodiments, the fusion protein comprises a Cas9 domain fused to one or more adenosine deaminase domains (e.g., a first adenosine deaminase and a second adenosine deaminase), wherein the fusion protein comprises or consists of the amino acid sequence of SEQ ID NO: 127. In some embodiments, the fusion protein comprises the amino acid sequence of SEQ ID NO: 128. In some embodiments, the fusion protein is the amino acid sequence of SEQ ID NO: 129. In some embodiments, the Cas9 domain of SEQ ID NOs: 127-129 is replaced with any of the Cas9 domains provided herein.

xCas9(3.7)-ABE: [symbol] [symbol] -nxCas9(3.7)-
NLS):
(SEQ ID NO: 127)

[symbol]

[symbol]

[symbol]

[symbol]

[symbol]

[symbol]

[symbol]

[symbol]

[symbol]

[symbol]

[symbol]

[symbol]

SEVEF
SHEYWMRHALTLAKRARDEREVPVGAVLVLNNRVIGEGWNRAIGLHDPTAHAEIMALROGGLVMQNYR
LIDATLYVTFEPCVMCAGAMIHSRIGRVVFGVRNAKTGAAGSLMDVLHYPGMNHRVEITEGILADECA
ALLCYFFRMPRQVFNAQKKAQSSTD [symbol] [symbol] DKKYSIGLAIG
TNSVGWAVITDEYKVPSKKFKVLGNTDRHSIKKNLIGALLFDSGETAEATRLKRTARRRYTRRKNRIC
YLQEIFSNEMAKVDDSFFHRLEESFLVEEDKKHERHPIFGNIVDEVAYHEKYPTIYHLRKKLVDSTDK
ADLRLIYLALAHMIKFRGHFLIEGDLNPDNSDVDKLFIQLVQTYNQLFEENPINASGVDAKAILSARL
SKSRRLENLIAQLPGEKKNGLFGNLIALSLGLTPNFKSNFDLAEDTKLQLSKDTYDDDLDNLLAQIGD
QYADLFLAAKNLSDAILLSDILRVNTEITKAPLSASMIKLYDEHHQDLTLLKALVRQQLPEKYKEIFF
DQSKNGYAGYIDGGASQEEFYKFIKPILEKMDGTEELLVKLNREDLLRKQRTFDNGIIPHQIHLGELH
AILRRQEDFYPFLKDNREKIEKILTFRIPYYVGPLARGNSRFAWMTRKSEETITPWNFEKVVDKGASA
QSFIERMTNFDKNLPNEKVLPKHSLLYEYFTVYNELTKVKYVTEGMRKPAFLSGDQKKAIVDLLFKTN
RKVTVKQLKEDYFKKIECFDSVEISGVEDRFNASLGTYHDLLKIIKDKDFLDNEENEDILEDIVLTLT
LFEDREMIEERLKTYAHLFDDKVMKQLKRRRYTGWGRLSRKLINGIRDKQSGKTILDFLKSDGFANRN
FIQLIHDDSLTFKEDIQKAQVSGQGDSLHEHIANLAGSPAIKKGILQTVKVVDELVKVMGRHKPENIV
IEMARENQTTQKGQKNSRERMKRIEEGIKELGSQILKEHPVENTQLQNEKLYLYYLQNGRDMYVDQEL
DINRLSDYDVDHIVPQSFLKDDSIDNKVLTRSDKNRGKSDNVPSEEVVKKMKNYWRQLLNAKLITQRK
FDNLTKAERGGLSELDKAGFIKRQLVETRQITKHVAQILDSRMNTKYDENDKLIREVKVITLKSKLVS
DFRKDFQFYKVREINNYHHAHDAYLNAVVGTALIKKYPKLESEFVYGDYKVYDVRKMIAKSEQEIGKA
TAKYFFYSNIMNFFKTEITLANGEIRKRPLIETNGETGEIVWDKGRDFATVRKVLSMPQVNIVKKTEV
QTGGFSKESILPKRNSDKLIARKKDWDPKKYGGFDSPTVAYSVLVVAKVEKGKSKKLKSVKELLGITI
MERSSFEKNPIDFLEAKGYKEVKKDLIIKLPKYSLFELENGRKRMLASAGVLQKGNELALPSKYVNFL
YLASHYEKLKGSPEDNEQKQLFVEQHKHYLDEIIEQISEFSKRVILADANLDKVLSAYNKHRDKPIRE
QAENIIHLFTLTNLGAPAAFKYFDTTIDRKRYTSTKEVLDATLIHQSITGLYETRIDLSQLGGD [symbol] [symbol]
PKKKRKV
xCas9(3.6)-ABE: [symbol] [symbol] -nxCas9(3.6)-
NLS):
(SEQ ID NO: 128)

[symbol]

[symbol]

[symbol]

[symbol]

[symbol]

[symbol]

[symbol]

[symbol]

[symbol]

[symbol]

[symbol]

[symbol]

SEVEF
SHEYWMRHALTLAKRARDEREVPVGAVLVLNNRVIGEGWNRAIGLHDPTAHAEIMALROGGLVMQNYR
LIDATLYVTFEPCVMCAGAMIHSRIGRVVFGVRNAKTGAAGSLMDVLHYPGMNHRVEITEGILADECA
ALLCYFFRMPRQVFNAQKKAQSSTD [symbol] [symbol] DKKYSIGLAIG
TNSVGWAVITDEYKVPSKKFKVLGNTDRHSIKKNLIGALLFDSGETAEATRLKRTARRRYTRRKNRIC
YLQEIFSNEMAKVDDSFFHRLEESFLVGEDKKHERHPIFGNIVDEVAYHEKYPTIYHLRKKLVDSTDK
ADLRLIYLALAHMIKFRGHFLIEGDLNPDNSDVDKLFIQLVQTYNQLFEENPINASGVDAKAILSARL
AKSRRLENLIAQLPGEKKNGLFGNLIALSLGLTPNFKSNFDLAEDTKLQLSKDTYDDDLDNLLAQIGD
QYADLFLAAKNLSDAILLSDILRVNTEITKAPLSASMIKRYDEHHQDLTLLKALVRQQLPEKYKEIFF
DQSKNGYAGYIDGGASQEEFYKFIKPILEKMDGTEELLVKLNREDLLRKQRTFDNGIIPHQIHLGELH
AILRRQEDFYPFLKDNREKIEKILTFRIPYYVGPLARGNSRFAWMTRKSEETITPWNFEKVVDKGASA
QSFIERMTNFDKNLPNEKVLPKHSLLYEYFTVYNELTKVKYVTEGMRKPAFLSGDQKKAIVDLLFKTN
RKVTVKQLKEDYFKKIECFDSVEISGVEDRFNASLGTYHDLLKIIKDKDFLDNEENEDILEDIVLTLT
LFEDREMIEERLKTYAHLFDDKVMKQLKRRRYTGWGRLSRKLINGIRDKQSGKTILDFLKSDGFANRN
FIQLIHDDSLTFKEDIQKAQVSGQGDSLHEHIANLAGSPAIKKGILQTVKVVDELVKVMGRHKPENIV
IEMARENQTTQKGQKNSRERMKRIEEGIKELGSQILKEHPVENTQLQNEKLYLYYLQNGRDMYVDQEL
DINRLSDYDVDHIVPQSFLKDDSIDNKVLTRSDKNRGKSDNVPSEEVVKKMKNYWRQLLNAKLITQRK
FDNLTKAERGGLSELDKAGFIKRQLVETRQITKHVAQILDSRMNTKYDENDKLIREVKVITLKSKLVS
DFRKDFQFYKVREINNYHHAHDAYLNAVVGTALIKKYPKLESEFVYGDYKVYDVRKMIAKSEQEIGKA
TAKYFFYSNIMNFFKTEITLANGEIRKRPLIETNGETGEIVWDKGRDFATVRKVLSMPQVNIVKKTEV
QTGGFSKESILPKRNSDKLIARKKDWDPKKYGGFDSPTVAYSVLVVAKVEKGKSKKLKSVKELLGITI
MERSSFEKNPIDFLEAKGYKEVKKDLIIKLPKYSLFELENGRKRMLASAGVLQKGNELALPSKYVNFL
YLASHYEKLKGSPEDNEQKQLFVEQHKHYLDEIIEQISEFSKRVILADANLDKVLSAYNKHRDKPIRE
QAENIIHLFTLTNLGAPAAFKYFDTTIDRKRYTSTKEVLDATLIHQSITGIYETRIDLSQLGGD [symbol] [symbol]
PKKKRKV
ABE7.10: ecTadA_{(wild-type)}-(SGGS)₂-XTEN-(SGGS)₂-
ecTadA_{(W23R}_H36L_P48A_R51L_L84F_A106V_D108N_H123Y_S146C_D147Y_R152P_E155V_I156F_K157N)-(SGGS)₂-XTEN-
(SGGS)₂_nCas9_SGGS_NLS
(SEQ ID NO: 129)
MSEVEFSHEYWMRHALTLAKRAWDEREVPVGAVLVHNNRVIGEGWNRPIGRHDPTAHAEI
MALRQGGLVMQNYRLIDATLYVTLEPCVMCAGAMIHSRIGRVVFGARDAKTGAAGSLMDVLHHPGMN
HRVEITEGILADECAALLSDFFRMRRQEIKAQKKAQSSTDSGGSSGGSSGSETPGTSESATPESSGG
SSGGSSEVEFSHEYWMRHALTLAKRARDEREVPVGAVLVLNNRVIGEGWNRAIGLHDPTAHAEIMAL
RQGGLVMQNYRLIDATLYVTFEPCVMCAGAMIHSRIGRVVFGVRNAKTGAAGSLMDVLHYPGMNHRV
EITEGILADECAALLCYFFRMPRQVFNAQKKAQSSTDSGGSSGGSSGSETPGTSESATPESSGGSSG
GSDKKYSIGLAIGTNSVGWAVITDEYKVPSKKFKVLGNTDRHSIKKNLIGALLFDSGETAEATRLKR
TARRRYTRRKNRICYLQEIFSNEMAKVDDSFFHRLEESFLVEEDKKHERHPIFGNIVDEVAYHEKYP
TIYHLRKKLVDSTDKADLRLIYLALAHMIKFRGHFLIEGDLNPDNSDVDKLFIQLVQTYNQLFEENP
INASGVDAKAILSARLSKSRRLENLIAQLPGEKKNGLFGNLIALSLGLTPNFKSNFDLAEDAKLQLS
KDTYDDDLDNLLAQIGDQYADLFLAAKNLSDAILLSDILRVNTEITKAPLSASMIKRYDEHHQDLTL
LKALVRQQLPEKYKEIFFDQSKNGYAGYIDGGASQEEFYKFIKPILEKMDGTEELLVKLNREDLLRK
QRTFDNGSIPHQIHLGELHAILRRQEDFYPFLKDNREKIEKILTFRIPYYVGPLARGNSRFAWMTRK
SEETITPWNFEEVVDKGASAQSFIERMTNFDKNLPNEKVLPKHSLLYEYFTVYNELTKVKYVTEGMR
KPAFLSGEQKKAIVDLLFKTNRKVTVKQLKEDYFKKIECFDSVEISGVEDRFNASLGTYHDLLKIIK
DKDFLDNEENEDILEDIVLTLTLFEDREMIEERLKTYAHLFDDKVMKQLKRRRYTGWGRLSRKLING
IRDKQSGKTILDFLKSDGFANRNFMQLIHDDSLTFKEDIQKAQVSGQGDSLHEHIANLAGSPAIKKG
ILQTVKVVDELVKVMGRHKPENIVIEMARENQTTQKGQKNSRERMKRIEEGIKELGSQILKEHPVEN
TQLQNEKLYLYYLQNGRDMYVDQELDINRLSDYDVDHIVPQSFLKDDSIDNKVLTRSDKNRGKSDNV
PSEEVVKKMKNYWRQLLNAKLITQRKFDNLTKAERGGLSELDKAGFIKRQLVETRQITKHVAQILDS
RMNTKYDENDKLIREVKVITLKSKLVSDFRKDFQFYKVREINNYHHAHDAYLNAVVGTALIKKYPKL
ESEFVYGDYKVYDVRKMIAKSEQEIGKATAKYFFYSNIMNFFKTEITLANGEIRKRPLIETNGETGE
IVWDKGRDFATVRKVLSMPQVNIVKKTEVQTGGFSKESILPKRNSDKLIARKKDWDPKKYGGFDSPT
VAYSVLVVAKVEKGKSKKLKSVKELLGITIMERSSFEKNPIDFLEAKGYKEVKKDLIIKLPKYSLFE
LENGRKRMLASAGELQKGNELALPSKYVNFLYLASHYEKLKGSPEDNEQKQLFVEQHKHYLDEIIEQ
ISEFSKRVILADANLDKVLSAYNKHRDKPIREQAENIIHLFTLTNLGAPAAFKYFDTTIDRKRYTS
TKEVLDATLIHQSITGLYETRIDLSQLGGDSGGSPKKKRKV

[0308] In some embodiments, the fusion proteins provided herein comprising one or more adenosine deaminase domains and a Cas9 domain exhibit an increased activity on a target sequence that does not comprise the canonical PAM (5′-NGG-3′) at its 3′ end as compared to a fusion protein comprising Streptococcus pyogenes Cas9 as provided by SEQ ID NO: 2. In some embodiments, the fusion protein exhibits an activity on a target sequence having a 3′ end that is not directly adjacent to the canonical PAM sequence (5′-NGG-3′) that is at least 2-fold, at least 3-fold, at least 4-fold, at least 5-fold, at least 10-fold, at least 50-fold, at least 100-fold, at least 500-fold, at least 1,000-fold, at least 5,000-fold, at least 10,000-fold, at least 50,000-fold, at least 100,000-fold, at least 500,000-fold, or at least 1,000,000-fold increased as compared to the activity of a fusion protein comprising Streptococcus pyogenes Cas9 as provided by SEQ ID NO: 2 on the same target sequence. In some embodiments, the 3′ end of the target sequence is directly adjacent to a sequence selected from the group consisting of NGT, NGA, NGC, and NNG, wherein N is an A, G, T, or C. In some embodiments, the 3′ end of the target sequence is directly adjacent to a sequence selected from the group consisting of CGG, AGT, TGG, AGT, CGT, GGG, CGT, TGT, GGT, AGC, CGC, TGC, GGC, AGA, CGA, TGA, GGA, GAA, GAT, and CAA. In some embodiments, the fusion protein activity is measured by a nuclease assay, a deamination assay, a transcriptional activation assay, or high-throughput sequencing. In some embodiments, the transcriptional activation assay is a GFP activation assay. In some embodiments, high-throughput sequencing is used to measure indel formation.

[0309] It should be appreciated that the fusion proteins of the present disclosure may comprise one or more additional features. For example, in some embodiments, the fusion protein may comprise cytoplasmic localization sequences, export sequences, such as nuclear export sequences, or other localization sequences, as well as sequence tags that are useful for solubilization, purification, or detection of the fusion proteins. Suitable protein tags provided herein include, but are not limited to, biotin carboxylase carrier protein (BCCP) tags, myc-tags, calmodulin-tags, FLAG-tags, hemagglutinin (HA)-tags, polyhistidine tags, also referred to as histidine tags or His-tags, maltose binding protein (MBP)-tags, nus-tags, glutathione-S-transferase (GST)-tags, green fluorescent protein (GFP)-tags, thioredoxin-tags, S-tags, Softags (e.g., Softag 1, Softag 3), strep-tags, biotin ligase tags, FlAsH tags, V5 tags, and SBP-tags. Additional suitable sequences will be apparent to those of ordinary skill in the art. In some embodiments, the fusion protein comprises one or more His tags.

[0310] Additional suitable strategies for generating fusion proteins comprising a napDNAbp (e.g., a Cas9 domain) and a nucleic acid editing domain (e.g., a deaminase domain) will be apparent to those of ordinary skill in the art based on this disclosure in combination with the general knowledge in the art. Suitable strategies for generating fusion proteins according to aspects of this disclosure using linkers or without the use of linkers will also be apparent to those of ordinary skill in the art in view of the instant disclosure and the knowledge in the art. For example, Gilbert et al., CRISPR-mediated modular RNA-guided regulation of transcription in eukaryotes. Cell. 2013; 154(2):442-51, showed that C-terminal fusions of Cas9 with VP64 using 2 NLS's as a linker, can be employed for transcriptional activation. Mali et al. (CAS9 transcriptional activators for target specificity screening and paired nickases for cooperative genome engineering. Nat Biotechnol. 2013; 31(9):833-8), reported that C-terminal fusions with VP64 without linker can be employed for transcriptional activation. And Maeder et al. (CRISPR RNA-guided activation of endogenous human genes. Nat Methods. 2013; 10: 977-979), reported that C-terminal fusions with VP64 using a GGGGS (SEQ ID NO: 94) linker can be used as transcriptional activators. Recently, dCas9FokI nuclease fusions have successfully been generated and exhibit improved enzymatic specificity as compared to the parental Cas9 enzyme (In Guilinger J P, Thompson D B, Liu D R. Fusion of catalytically inactive Cas9 to FokI nuclease improves the specificity of genome modification. Nat. Biotechnol. 2014; 32(6): 577-82; and in Tsai S Q, et al. Dimeric CRISPR RNA-guided FokI nucleases for highly specific genome editing. Nat Biotechnol. 2014; 32(6):569-76. PMID: 24770325 a SGSETPGTSESATPES (SEQ ID NO: 89) or a GGGGS (SEQ ID NO: 94) linker was used in FokI-dCas9 fusion proteins, respectively).

[0311] In some embodiments, the Cas9 fusion protein comprises: (i) Cas9 domain; and (ii) a transcriptional activator domain. In some embodiments, the transcriptional activator domain comprises a VPR. VPR is a VP64-SV40-P65-RTA tripartite activator. In some embodiments, VPR comprises a VP64 amino acid sequence encoded by the nucleic acid sequence of SEQ ID NO: 85:

(SEQ ID NO: 73)
GAGGCCAGCGGTTCCGGACGGGCTGACGCATTGGACGATTTTGATCTGGAT
ATGCTGGGAAGTGACGCCCTCGATGATTTTGACCTTGACATGCTTGGTTCG
GATGCCCTTGATGACTTTGACCTCGACATGCTCGGCAGTGACGCCCTTGAT
GATTTCGACCTGGACATGCTGATTAACTCTAGATAG.

[0312] In some embodiments, VPR comprises a VP64 amino acid sequence as set forth in SEQ ID NO: 86:

(SEQ ID NO: 86)
EASGSGRADALDDFDLDMLGSDALDDFDLDMLGSDALDDFDLDMLGSDALD
DFDLDMLINSR.

[0313] In some embodiments, VPR comprises a VP64-SV40-P65-RTA amino acid sequence encoded by the nucleic acid sequence of SEQ ID NO: 87:

(SEQ ID NO: 87)
TCGCCAGGGATCCGTCGACTTGACGCGTTGATATCAACAAGTTTGTACAAA
AAAGCAGGCTACAAAGAGGCCAGCGGTTCCGGACGGGCTGACGCATTGGAC
GATTTTGATCTGGATATGCTGGGAAGTGACGCCCTCGATGATTTTGACCTT
GACATGCTTGGTTCGGATGCCCTTGATGACTTTGACCTCGACATGCTCGGC
AGTGACGCCCTTGATGATTTCGACCTGGACATGCTGATTAACTCTAGAAGT
TCCGGATCTCCGAAAAAGAAACGCAAAGTTGGTAGCCAGTACCTGCCCGAC
ACCGACGACCGGCACCGGATCGAGGAAAAGCGGAAGCGGACCTACGAGACA
TTCAAGAGCATCATGAAGAAGTCCCCCTTCAGCGGCCCCACCGACCCTAGA
CCTCCACCTAGAAGAATCGCCGTGCCCAGCAGATCCAGCGCCAGCGTGCCA
AAACCTGCCCCCCAGCCTTACCCCTTCACCAGCAGCCTGAGCACCATCAAC
TACGACGAGTTCCCTACCATGGTGTTCCCCAGCGGCCAGATCTCTCAGGCC
TCTGCTCTGGCTCCAGCCCCTCCTCAGGTGCTGCCTCAGGCTCCTGCTCCT
GCACCAGCTCCAGCCATGGTGTCTGCACTGGCTCAGGCACCAGCACCCGTG
CCTGTGCTGGCTCCTGGACCTCCACAGGCTGTGGCTCCACCAGCCCCTAAA
CCTACACAGGCCGGCGAGGGCACACTGTCTGAAGCTCTGCTGCAGCTGCAG
TTCGACGACGAGGATCTGGGAGCCCTGCTGGGAAACAGCACCGATCCTGCC
GTGTTCACCGACCTGGCCAGCGTGGACAACAGCGAGTTCCAGCAGCTGCTG
AACCAGGGCATCCCTGTGGCCCCTCACACCACCGAGCCCATGCTGATGGAA
TACCCCGAGGCCATCACCCGGCTCGTGACAGGCGCTCAGAGGCCTCCTGAT
CCAGCTCCTGCCCCTCTGGGAGCACCAGGCCTGCCTAATGGACTGCTGTCT
GGCGACGAGGACTTCAGCTCTATCGCCGATATGGATTTCTCAGCCTTGCTG
GGCTCTGGCAGCGGCAGCCGGGATTCCAGGGAAGGGATGTTTTTGCCGAAG
CCTGAGGCCGGCTCCGCTATTAGTGACGTGTTTGAGGGCCGCGAGGTGTGC
CAGCCAAAACGAATCCGGCCATTTCATCCTCCAGGAAGTCCATGGGCCAAC
CGCCCACTCCCCGCCAGCCTCGCACCAACACCAACCGGTCCAGTACATGAG
CCAGTCGGGTCACTGACCCCGGCACCAGTCCCTCAGCCACTGGATCCAGCG
CCCGCAGTGACTCCCGAGGCCAGTCACCTGTTGGAGGATCCCGATGAAGAG
ACGAGCCAGGCTGTCAAAGCCCTTCGGGAGATGGCCGATACTGTGATTCCC
CAGAAGGAAGAGGCTGCAATCTGTGGCCAAATGGACCTTTCCCATCCGCCC
CCAAGGGGCCATCTGGATGAGCTGACAACCACACTTGAGTCCATGACCGAG
GATCTGAACCTGGACTCACCCCTGACCCCGGAATTGAACGAGATTCTGGAT
ACCTTCCTGAACGACGAGTGCCTCTTGCATGCCATGCATATCAGCACAGGA
CTGTCCATCTTCGACACATCTCTGTTTTGA.

[0314] In some embodiments, VPR comprises a VP64-SV40-P65-RTA amino acid sequence as set forth in SEQ ID NO: 88:

(SEQ ID NO: 88)
SPGIRRLDALISTSLYKKAGYKEASGSGRADALDDFDLDMLGSDALDDFDL
DMLGSDALDDFDLDMLGSDALDDFDLDMLINSRSSGSPKKKRKVGSQYLPD
TDDRHRIEEKRKRTYETFKSIMKKSPFSGPTDPRPPPRRIAVPSRSSASVP
KPAPQPYPFTSSLSTINYDEFPTMVFPSGQISQASALAPAPPQVLPQAPAP
APAPAMVSALAQAPAPVPVLAPGPPQAVAPPAPKPTQAGEGTLSEALLQLQ
FDDEDLGALLGNSTDPAVFTDLASVDNSEFQQLLNQGIPVAPHTTEPMLME
YPEAITRLVTGAQRPPDPAPAPLGAPGLPNGLLSGDEDFSSIADMDFSALL
GSGSGSRDSREGMFLPKPEAGSAISDVFEGREVCQPKRIRPFHPPGSPWAN
RPLPASLAPTPTGPVHEPVGSLTPAPVPQPLDPAPAVTPEASHLLEDPDEE
TSQAVKALREMADTVIPQKEEAAICGQMDLSHPPPRGHLDELTTTLESMTE
DLNLDSPLTPELNEILDTFLNDECLLHAMHISTGLSIFDTSLF.

[0315] Some aspects of this disclosure provide fusion proteins comprising a transcription activator. In some embodiments, the transcriptional activator is VPR. In some embodiments, the VPR comprises a wild type VPR or a VPR as set forth in SEQ ID NO: 88. In some embodiments, the VPR proteins provided herein include fragments of VPR and proteins homologous to a VPR or a VPR fragment. For example, in some embodiments, a VPR comprises a fragment of the amino acid sequence set forth in SEQ ID NO: 88. In some embodiments, a VPR comprises an amino acid sequence homologous to the amino acid sequence set forth in SEQ ID NO: 88 or an amino acid sequence homologous to a fragment of the amino acid sequence set forth in SEQ ID NO: 8. In some embodiments, proteins comprising VPR or fragments of VPR or homologs of VPR or VPR fragments are referred to as “VPR variants.” A VPR variant shares homology to VPR, or a fragment thereof. For example a VPR variant is at least about 70% identical, at least about 80% identical, at least about 90% identical, at least about 95% identical, at least about 96% identical, at least about 97% identical, at least about 98% identical, at least about 99% identical, at least about 99.5% identical, or at least about 99.9% to a wild type VPR or a VPR as set forth in SEQ ID NO: 88. In some embodiments, the VPR variant comprises a fragment of VPR, such that the fragment is at least about 70% identical, at least about 80% identical, at least about 90% identical, at least about 95% identical, at least about 96% identical, at least about 97% identical, at least about 98% identical, at least about 99% identical, at least about 99.5% identical, or at least about 99.9% to the corresponding fragment of wild type VPR or a VPR as set forth in SEQ ID NO: 88. In some embodiments, the VPR comprises the amino acid sequence set forth in SEQ ID NO: 88. In some embodiments, the VPR comprises an amino acid sequence encoded by the nucleotide sequence set forth in SEQ ID NO: 88.

[0316] In some embodiments, a VPR is a VP64-SV40-P65-RTA triple activator. In some embodiments, the VP64-SV40-P65-RTA comprises a VP64-SV40-P65-RTA as set forth in SEQ ID NO: 88. In some embodiments, the VP64-SV40-P65-RTA proteins provided herein include fragments of VP64-SV40-P65-RTA and proteins homologous to a VP64-SV40-P65-RTA or a VP64-SV40-P65-RTA fragment. For example, in some embodiments, a VP64-SV40-P65-RTA comprises a fragment of the amino acid sequence set forth in SEQ ID NO: 88. In some embodiments, a VP64-SV40-P65-RTA comprises an amino acid sequence homologous to the amino acid sequence set forth in SEQ ID NO: 88 or an amino acid sequence homologous to a fragment of the amino acid sequence set forth in SEQ ID NO: 88. In some embodiments, proteins comprising VP64-SV40-P65-RTA or fragments of VP64-SV40-P65-RTA or homologs of VP64-SV40-P65-RTA or VP64-SV40-P65-RTA fragments are referred to as “VP64-SV40-P65-RTA variants.” A VP64-SV40-P65-RTA variant shares homology to VP64-SV40-P65-RTA, or a fragment thereof. For example a VP64-SV40-P65-RTA variant is at least about 70% identical, at least about 80% identical, at least about 90% identical, at least about 95% identical, at least about 96% identical, at least about 97% identical, at least about 98% identical, at least about 99% identical, at least about 99.5% identical, or at least about 99.9% to a VP64-SV40-P65-RTA as set forth in SEQ ID NO: 88. In some embodiments, the VP64-SV40-P65-RTA variant comprises a fragment of VP64-SV40-P65-RTA, such that the fragment is at least about 70% identical, at least about 80% identical, at least about 90% identical, at least about 95% identical, at least about 96% identical, at least about 97% identical, at least about 98% identical, at least about 99% identical, at least about 99.5% identical, or at least about 99.9% to a fragment of a VP64-SV40-P65-RTA as set forth in SEQ ID NO: 88. In some embodiments, the VP64-SV40-P65-RTA comprises the amino acid sequence set forth in SEQ ID NO: 88. In some embodiments, the VP64-SV40-P65-RTA comprises an amino acid sequence encoded by the nucleotide sequence set forth in SEQ ID NO: 87.

[0317] In some embodiments, the fusion protein comprises the nucleic acid sequence of SEQ ID NO: 87.

dCas9-VPR (dCas9(3.7)-NLS-linker(22aa)-VP64-linker(4aa)-NLS-p65AD-
linker(6aa)-RtaAD)
(SEQ ID NO: 131)
ATGGACAAGAAGTACTCCATTGGGCTCGATATCGGCACAAACAGCGTCGGCTGGGCCGTCATTACGGA
CGAGTACAAGGTGCCGAGCAAAAAATTCAAAGTTCTGGGCAATACCGATCGCCACAGCATAAAGAAGA
ACCTCATTGGCGCCCTCCTGTTCGACTCCGGGGAGACGGCCGAAGCCACGCGGCTCAAAAGAACAGCA
CGGCGCAGATATACCCGCAGAAAGAATCGGATCTGCTACCTGCAGGAGATCTTTAGTAATGAGATGGC
TAAGGTGGATGACTCTTTCTTCCATAGGCTGGAGGAGTCCTTTTTGGTGGAGGAGGATAAAAAGCACG
AGCGCCACCCAATCTTTGGCAATATCGTGGACGAGGTGGCGTACCATGAAAAGTACCCAACCATATAT
CATCTGAGGAAGAAGCTTGTAGACAGTACTGATAAGGCTGACTTGCGGTTGATCTATCTCGCGCTGGC
GCATATGATCAAATTTCGGGGACACTTCCTCATCGAGGGGGACCTGAACCCAGACAACAGCGATGTCG
ACAAACTCTTTATCCAACTGGTTCAGACTTACAATCAGCTTTTCGAAGAGAACCCGATCAACGCATCC
GGAGTTGACGCCAAAGCAATCCTGAGCGCTAGGCTGTCCAAATCCCGGCGGCTCGAAAACCTCATCGC
ACAGCTCCCTGGGGAGAAGAAGAACGGCCTGTTTGGTAATCTTATCGCCCTGTCCCTCGGGCTGACCC
CCAACTTTAAATCTAACTTCGACCTGGCCGAAGATACCAAGCTTCAACTGAGCAAAGACACCTACGAT
GATGATCTCGACAATCTGCTGGCCCAGATCGGCGACCAGTACGCAGACCTTTTTTTGGCGGCAAAGAA
CCTGTCAGACGCCATTCTGCTGAGTGATATTCTGCGAGTGAACACGGAGATCACCAAAGCTCCGCTGA
GCGCTAGTATGATCAAGCTCTATGATGAGCACCACCAAGACTTGACTTTGCTGAAGGCCCTTGTCAGA
CAGCAACTGCCTGAGAAGTACAAGGAAATTTTCTTCGATCAGTCTAAAAATGGCTACGCCGGATACAT
TGACGGCGGAGCAAGCCAGGAGGAATTTTACAAATTTATTAAGCCCATCTTGGAAAAAATGGACGGCA
CCGAGGAGCTGCTGGTAAAGCTTAACAGAGAAGATCTGTTGCGCAAACAGCGCACTTTCGACAATGGA
ATCATCCCCCACCAGATTCACCTGGGCGAACTGCACGCTATCCTCAGGCGGCAAGAGGATTTCTACCC
CTTTTTGAAAGATAACAGGGAAAAGATTGAGAAAATCCTCACATTTCGGATACCCTACTATGTAGGCC
CCCTCGCCCGGGGAAATTCCAGATTCGCGTGGATGACTCGCAAATCAGAAGAGACCATCACTCCCTGG
AACTTCGAGAAAGTCGTGGATAAGGGGGCCTCTGCCCAGTCCTTCATCGAAAGGATGACTAACTTTGA
TAAAAATCTGCCTAACGAAAAGGTGCTTCCTAAACACTCTCTGCTGTACGAGTACTTCACAGTTTATA
ACGAGCTCACCAAGGTCAAATACGTCACAGAAGGGATGAGAAAGCCAGCATTCCTGTCTGGAGATCAG
AAGAAAGCTATTGTGGACCTCCTCTTCAAGACGAACCGGAAAGTTACCGTGAAACAGCTCAAAGAAGA
CTATTTCAAAAAGATTGAATGTTTCGACTCTGTTGAAATCAGCGGAGTGGAGGATCGCTTCAACGCAT
CCCTGGGAACGTATCACGATCTCCTGAAAATCATTAAAGACAAGGACTTCCTGGACAATGAGGAGAAC
GAGGACATTCTTGAGGACATTGTCCTCACCCTTACGTTGTTTGAAGATAGGGAGATGATTGAAGAACG
CTTGAAAACTTACGCTCATCTCTTCGACGACAAAGTCATGAAGCAGCTCAAGAGGCGCCGATATACAG
GATGGGGGCGGCTGTCAAGAAAACTGATCAATGGGATCCGAGACAAGCAGAGTGGAAAGACAATCCTG
GATTTTCTTAAGTCCGATGGATTTGCCAACCGGAACTTCATTCAGTTGATCCATGATGACTCTCTCAC
CTTTAAGGAGGACATCCAGAAAGCACAAGTTTCTGGCCAGGGGGACAGTCTTCACGAGCACATCGCTA
ATCTTGCAGGTAGCCCAGCTATCAAAAAGGGAATACTGCAGACCGTTAAGGTCGTGGATGAACTCGTC
AAAGTAATGGGAAGGCATAAGCCCGAGAATATCGTTATCGAGATGGCCCGAGAGAACCAAACCACCCA
GAAGGGACAGAAGAACAGTAGGGAAAGGATGAAGAGGATTGAAGAGGGTATAAAAGAACTGGGGTCCC
AAATCCTTAAGGAACACCCAGTTGAAAACACCCAGCTTCAGAATGAGAAGCTCTACCTGTACTACCTG
CAGAACGGCAGGGACATGTACGTGGATCAGGAACTGGACATCAATCGGCTCTCCGACTACGACGTGGA
TCATATCGTGCCCCAGTCTTTTCTCAAAGATGATTCTATTGATAATAAAGTGTTGACAAGATCCGATA
AAAATAGAGGGAAGAGTGATAACGTCCCCTCAGAAGAAGTTGTCAAGAAAATGAAAAATTATTGGCGG
CAGCTGCTGAACGCCAAACTGATCACACAACGGAAGTTCGATAATCTGACTAAGGCTGAACGAGGTGG
CCTGTCTGAGTTGGATAAAGCCGGTTTCATCAAAAGGCAGCTTGTTGAGACACGCCAGATCACCAAGC
ACGTGGCCCAAATTCTCGATTCACGCATGAACACCAAGTACGATGAAAATGACAAACTGATTCGAGAG
GTGAAAGTTATTACTCTGAAGTCTAAGCTGGTCTCAGATTTCAGAAAGGACTTTCAGTTTTATAAGGT
GAGAGAGATCAACAATTACCACCATGCGCATGATGCCTACCTGAATGCAGTGGTAGGCACTGCACTTA
TCAAAAAATATCCCAAGCTTGAATCTGAATTTGTTTACGGAGACTATAAAGTGTACGATGTTAGGAAA
ATGATCGCAAAGTCTGAGCAGGAAATAGGCAAGGCCACCGCTAAGTACTTCTTTTACAGCAATATTAT
GAATTTTTTCAAGACCGAGATTACACTGGCCAATGGAGAGATTCGGAAGCGACCACTTATCGAAACAA
ACGGAGAAACAGGAGAAATCGTGTGGGACAAGGGTAGGGATTTCGCGACAGTCCGGAAGGTCCTGTCC
ATGCCGCAGGTGAACATCGTTAAAAAGACCGAAGTACAGACCGGAGGCTTCTCCAAGGAAAGTATCCT
CCCGAAAAGGAACAGCGACAAGCTGATCGCACGCAAAAAAGATTGGGACCCCAAGAAATACGGCGGAT
TCGATTCTCCTACAGTCGCTTACAGTGTACTGGTTGTGGCCAAAGTGGAGAAAGGGAAGTCTAAAAAA
CTCAAAAGCGTCAAGGAACTGCTGGGCATCACAATCATGGAGCGATCAAGCTTCGAAAAAAACCCCAT
CGACTTTCTCGAGGCGAAAGGATATAAAGAGGTCAAAAAAGACCTCATCATTAAGCTTCCCAAGTACT
CTCTCTTTGAGCTTGAAAACGGCCGGAAACGAATGCTCGCTAGTGCGGGCGTGCTGCAGAAAGGTAAC
GAGCTGGCACTGCCCTCTAAATACGTTAATTTCTTGTATCTGGCCAGCCACTATGAAAAGCTCAAAGG
GTCTCCCGAAGATAATGAGCAGAAGCAGCTGTTCGTGGAACAACACAAACACTACCTTGATGAGATCA
TCGAGCAAATAAGCGAATTCTCCAAAAGAGTGATCCTCGCCGACGCTAACCTCGATAAGGTGCTTTCT
GCTTACAATAAGCACAGGGATAAGCCCATCAGGGAGCAGGCAGAAAACATTATCCACTTGTTTACTCT
GACCAACTTGGGCGCGCCTGCAGCCTTCAAGTACTTCGACACCACCATAGACAGAAAGCGGTACACCT
CTACAAAGGAGGTCCTGGACGCCACACTGATTCATCAGTCAATTACGGGGCTCTATGAAACAAGAATC
GACCTCTCTCAGCTCGGTGGAGACCCCCAAGAAGAAGAGGAAGGTGTCGCCAGGGATCCGTCGACTTG
ACGCGTTGATATCAACAAGTTTGTACAAAAAAGCAGGCTACAAAGAGGCCAGCGGTTCCGGACGGGCT
GACGCATTGGACGATTTTGATCTGGATATGCTGGGAAGTGACGCCCTCGATGATTTTGACCTTGACAT
GCTTGGTTCGGATGCCCTTGATGACTTTGACCTCGACATGCTCGGCAGTGACGCCCTTGATGATTTCG
ACCTGGACATGCTGATTAACTCTAGAAGTTCCGGATCTCCGAAAAAGAAACGCAAAGTTGGTAGCCAG
TACCTGCCCGACACCGACGACCGGCACCGGATCGAGGAAAAGCGGAAGCGGACCTACGAGACATTCAA
GAGCATCATGAAGAAGTCCCCCTTCAGCGGCCCCACCGACCCTAGACCTCCACCTAGAAGAATCGCCG
TGCCCAGCAGATCCAGCGCCAGCGTGCCAAAACCTGCCCCCCAGCCTTACCCCTTCACCAGCAGCCTG
AGCACCATCAACTACGACGAGTTCCCTACCATGGTGTTCCCCAGCGGCCAGATCTCTCAGGCCTCTGC
TCTGGCTCCAGCCCCTCCTCAGGTGCTGCCTCAGGCTCCTGCTCCTGCACCAGCTCCAGCCATGGTGT
CTGCACTGGCTCAGGCACCAGCACCCGTGCCTGTGCTGGCTCCTGGACCTCCACAGGCTGTGGCTCCA
CCAGCCCCTAAACCTACACAGGCCGGCGAGGGCACACTGTCTGAAGCTCTGCTGCAGCTGCAGTTCGA
CGACGAGGATCTGGGAGCCCTGCTGGGAAACAGCACCGATCCTGCCGTGTTCACCGACCTGGCCAGCG
TGGACAACAGCGAGTTCCAGCAGCTGCTGAACCAGGGCATCCCTGTGGCCCCTCACACCACCGAGCCC
ATGCTGATGGAATACCCCGAGGCCATCACCCGGCTCGTGACAGGCGCTCAGAGGCCTCCTGATCCAGC
TCCTGCCCCTCTGGGAGCACCAGGCCTGCCTAATGGACTGCTGTCTGGCGACGAGGACTTCAGCTCTA
TCGCCGATATGGATTTCTCAGCCTTGCTGGGCTCTGGCAGCGGCAGCCGGGATTCCAGGGAAGGGATG
TTTTTGCCGAAGCCTGAGGCCGGCTCCGCTATTAGTGACGTGTTTGAGGGCCGCGAGGTGTGCCAGCC
AAAACGAATCCGGCCATTTCATCCTCCAGGAAGTCCATGGGCCAACCGCCCACTCCCCGCCAGCCTCG
CACCAACACCAACCGGTCCAGTACATGAGCCAGTCGGGTCACTGACCCCGGCACCAGTCCCTCAGCCA
CTGGATCCAGCGCCCGCAGTGACTCCCGAGGCCAGTCACCTGTTGGAGGATCCCGATGAAGAGACGAG
CCAGGCTGTCAAAGCCCTTCGGGAGATGGCCGATACTGTGATTCCCCAGAAGGAAGAGGCTGCAATCT
GTGGCCAAATGGACCTTTCCCATCCGCCCCCAAGGGGCCATCTGGATGAGCTGACAACCACACTTGAG
TCCATGACCGAGGATCTGAACCTGGACTCACCCCTGACCCCGGAATTGAACGAGATTCTGGATACCTT
CCTGAACGACGAGTGCCTCTTGCATGCCATGCATATCAGCACAGGACTGTCCATCTTCGACACATCTC
TGTTT.

[0318] Some aspects of this disclosure provide fusion proteins comprising a Cas9 domain as provided herein that is fused to a second protein, or a “fusion partner”, such as a nucleic acid editing domain, thus forming a fusion protein. In some embodiments, the nucleic acid editing domain is fused to the N-terminus of the Cas9 domain. In some embodiments, the nucleic acid editing domain is fused to the C-terminus of the Cas9 domain. In some embodiments, the Cas9 domain and the nucleic acid editing domain are fused to each other via a linker. Suitable strategies for generating fusion proteins according to aspects of this disclosure using linkers or without the use of linkers will also be apparent to those of skill in the art in view of the instant disclosure and the knowledge in the art. For example, Gilbert et al., CRISPR-mediated modular RNA-guided regulation of transcription in eukaryotes. Cell. 2013; 154(2):442-51, showed that C-terminal fusions of Cas9 with VP64 using 2 NLS's as a linker (SPKKKRKVEAS), can be employed for transcriptional activation. Mali et al., CAS9 transcriptional activators for target specificity screening and paired nickases for cooperative genome engineering. Nat Biotechnol. 2013; 31(9):833-8, reported that C-terminal fusions with VP64 without linker can be employed for transcriptional activation. Maeder et al., CRISPR RNA-guided activation of endogenous human genes. Nat Methods. 2013; 10: 977-979, reported that C-terminal fusions with VP64 using a GGGGS (SEQ ID NO: 94) linker can be used as transcriptional activators. Recently, dCas9-FokI nuclease fusions have successfully been generated and exhibit improved enzymatic specificity as compared to the parental Cas9 enzyme (In Guilinger J P, Thompson D B, Liu D R. Fusion of catalytically inactive Cas9 to FokI nuclease improves the specificity of genome modification. Nat. Biotechnol. 2014; 32(6): 577-82, and in Tsai S Q, Wyvekens N, Khayter C, Foden J A, Thapar V, Reyon D, Goodwin M J, Aryee M J, Joung J K. Dimeric CRISPR RNA-guided FokI nucleases for highly specific genome editing. Nat Biotechnol. 2014; 32(6):569-76. PMID: 24770325 a SGSETPGTSESATPES (SEQ ID NO: 89) or a GGGGSₙ (SEQ ID NO: 95) linker was used in FokI-dCas9 fusion proteins, respectively).

[0319] In some embodiments, the second protein in the fusion protein (i.e., the fusion partner) comprises a nucleic acid editing domain. Such a nucleic acid editing domain may be, without limitation, a nuclease, a nickase, a recombinase, a deaminase, a methyltransferase, a methylase, an acetylase, or an acetyltransferase. Non-limiting exemplary nucleic acid editing domains that may be used in accordance with this disclosure include cytidine deaminases and adenosine deaminases. In some embodiments, the nucleic acid editing domain is a deaminase domain. In some embodiments, the nucleic acid editing domain is a nuclease domain. In some embodiments, the nuclease domain is a FokI DNA cleavage domain. In some embodiments, this disclosure provides dimers of the fusion proteins provided herein, e.g., dimers of fusion proteins may include a dimerizing nuclease domain. In some embodiments, the nucleic acid editing domain is a nickase domain. In some embodiments, the nucleic acid editing domain is a recombinase domain. In some embodiments, the nucleic acid editing domain is a methyltransferase domain. In some embodiments, the nucleic acid editing domain is a methylase domain. In some embodiments, the nucleic acid editing domain is an acetylase domain. In some embodiments, the nucleic acid editing domain is an acetyltransferase domain. Additional nucleic acid editing domains would be apparent to a person of ordinary skill in the art based on this disclosure and knowledge in the field and are within the scope of this disclosure. In other embodiments, the second protein comprises a domain that modulates transcriptional activity. Such transcriptional modulating domains may be, without limitation, a transcriptional activator or transcriptional repressor domain.

### Guide RNA

[0320] In various embodiments, the base editors described herein may be complexed, bound, or otherwise associated with (e.g., via any type of covalent or non-covalent bond) one or more guide sequences, i.e., the sequence which becomes associated or bound to the base editor and directs its localization to a specific target sequence having complementarity to the guide sequence or a portion thereof. The particular design embodiments of a guide sequence will depend upon the nucleotide sequence of a genomic target site of interest (i.e., the desired site to be edited) and the type of napDNAbp (e.g., type of Cas protein) present in the base editor, among other factors, such as PAM sequence locations, percent G/C content in the target sequence, the degree of microhomology regions, secondary structures, etc.

[0321] In general, a guide sequence is any polynucleotide sequence having sufficient complementarity with a target polynucleotide sequence to hybridize with the target sequence and direct sequence-specific binding of a napDNAbp (e.g., a Cas9, Cas9 homolog, or Cas9 variant) to the target sequence. In some embodiments, the degree of complementarity between a guide sequence and its corresponding target sequence, when optimally aligned using a suitable alignment algorithm, is about or more than about 50%, 60%, 75%, 80%, 85%, 90%, 95%, 97.5%, 99%, or more. Optimal alignment may be determined with the use of any suitable algorithm for aligning sequences, non-limiting example of which include the Smith-Waterman algorithm, the Needleman-Wunsch algorithm, algorithms based on the Burrows-Wheeler Transform (e.g. the Burrows Wheeler Aligner), ClustalW, Clustal X, BLAT, Novoalign (Novocraft Technologies, ELAND (Illumina, San Diego, Calif.), SOAP (available at soap.genomics.org.cn), and Maq (available at maq.sourceforge.net). In some embodiments, a guide sequence is about or more than about 5, 10, 11, 12, 13, 14, 15, 16, 17, 18, 19, 20, 21, 22, 23, 24, 25, 26, 27, 28, 29, 30, 35, 40, 45, 50, 75, or more nucleotides in length.

[0322] In some embodiments, a guide sequence is less than about 75, 50, 45, 40, 35, 30, 25, 20, 15, 12, or fewer nucleotides in length. The ability of a guide sequence to direct sequence-specific binding of a base editor to a target sequence may be assessed by any suitable assay. For example, the components of a base editor, including the guide sequence to be tested, may be provided to a host cell having the corresponding target sequence, such as by transfection with vectors encoding the components of a base editor disclosed herein, followed by an assessment of preferential cleavage within the target sequence, such as by Surveyor assay as described herein. Similarly, cleavage of a target polynucleotide sequence may be evaluated in a test tube by providing the target sequence, components of a base editor, including the guide sequence to be tested and a control guide sequence different from the test guide sequence, and comparing binding or rate of cleavage at the target sequence between the test and control guide sequence reactions. Other assays are possible, and will occur to those skilled in the art.

[0323] A guide sequence may be selected to target any target sequence. In some embodiments, the target sequence is a sequence within a genome of a cell. Exemplary target sequences include those that are unique in the target genome. For example, for the S. pyogenes Cas9, a unique target sequence in a genome may include a Cas9 target site of the form MMMMMMMMNNNNNNNNNNNNXGG (SEQ ID NO: 134) where NNNNNNNNNNNNXGG (N is A, G, T, or C; and X can be anything) (SEQ ID NO: 135) has a single occurrence in the genome. A unique target sequence in a genome may include an S. pyogenes Cas9 target site of the form MMMMMMMMMNNNNNNNNNNNXGG (SEQ ID NO: 134) where NNNNNNNNNNNXGG (N is A, G, T, or C; and X can be anything) (SEQ ID NO: 135) has a single occurrence in the genome. For the S. thermophilus CRISPR1Cas9, a unique target sequence in a genome may include a Cas9 target site of the form MMMMMMMMNNNNNNNNNNNNXXAGAAW (SEQ ID NO: 138) where NNNNNNNNNNNNXXAGAAW (N is A, G, T, or C; X can be anything; and W is A or T) (SEQ ID NO: 139) has a single occurrence in the genome. A unique target sequence in a genome may include an S. thermophilus CRISPR 1 Cas9 target site of the form MMMMMMMMMNNNNNNNNNNNXXAGAAW (SEQ ID NO: 140) where NNNNNNNNNNNXXAGAAW (N is A, G, T, or C; X can be anything; and W is A or T) (SEQ ID NO: 140) has a single occurrence in the genome. For the S. pyogenes Cas9, a unique target sequence in a genome may include a Cas9 target site of the form MMMMMMMMNNNNNNNNNNNNXGGXG (SEQ ID NO: 142) where NNNNNNNNNNNNXGGXG (N is A, G, T, or C; and X can be anything) (SEQ ID NO: 142) has a single occurrence in the genome. A unique target sequence in a genome may include an S. pyogenes Cas9 target site of the form MMMMMMMMMNNNNNNNNNNNXGGXG (SEQ ID NO: 144) where NNNNNNNNNNNXGGXG (N is A, G, T, or C; and X can be anything) (SEQ ID NO: 145) has a single occurrence in the genome. In each of these sequences “M” may be A, G, T, or C, and need not be considered in identifying a sequence as unique.

[0324] In some embodiments, a guide sequence is selected to reduce the degree of secondary structure within the guide sequence. Secondary structure may be determined by any suitable polynucleotide folding algorithm. Some programs are based on calculating the minimal Gibbs free energy. An example of one such algorithm is mFold, as described by Zuker & Stiegler (Nucleic Acids Res. 9 (1981), 133-148). Another example folding algorithm is the online webserver RNAfold, developed at Institute for Theoretical Chemistry at the University of Vienna, using the centroid structure prediction algorithm (see, e.g., A. R. Gruber et al., 2008, Cell 106(1): 23-24; and PA Carr & GM Church, 2009, Nature Biotechnology 27(12): 1151-62). Additional algorithms may be found in Chuai, G. et al., DeepCRISPR: optimized CRISPR guide RNA design by deep learning, Genome Biol. 19:80 (2018), and U.S. application Ser. No. 61/836,080, the entireties of each of which are incorporated herein by reference.

[0325] The guide sequence is linked to a tracr mate sequence which in turn hybridizes to a tracr sequence. A tracr mate sequence includes any sequence that has sufficient complementarity with a tracr sequence to promote one or more of: (1) excision of a guide sequence flanked by tracr mate sequences in a cell containing the corresponding tracr sequence; and (2) formation of a complex at a target sequence, wherein the complex comprises the tracr mate sequence hybridized to the tracr sequence. In general, degree of complementarity is with reference to the optimal alignment of the tracr mate sequence and tracr sequence, along the length of the shorter of the two sequences. Optimal alignment may be determined by any suitable alignment algorithm, and may further account for secondary structures, such as self-complementarity within either the tracr sequence or tracr mate sequence. In some embodiments, the degree of complementarity between the tracr sequence and tracr mate sequence along the length of the shorter of the two when optimally aligned is about or more than about 25%, 30%, 40%, 50%, 60%, 70%, 80%, 90%, 95%, 97.5%, 99%, or higher. In some embodiments, the tracr sequence is about or more than about 5, 6, 7, 8, 9, 10, 11, 12, 13, 14, 15, 16, 17, 18, 19, 20, 25, 30, 40, 50, or more nucleotides in length. In some embodiments, the tracr sequence and tracr mate sequence are contained within a single transcript, such that hybridization between the two produces a transcript having a secondary structure, such as a hairpin. Preferred loop forming sequences for use in hairpin structures are four nucleotides in length, and most preferably have the sequence GAAA. However, longer or shorter loop sequences may be used, as may alternative sequences. The sequences preferably include a nucleotide triplet (for example, AAA), and an additional nucleotide (for example C or G). Examples of loop forming sequences include CAAA and AAAG. In an embodiment of the disclosure, the transcript or transcribed polynucleotide sequence has at least two or more hairpins. In certain embodiments, the transcript has two, three, four or five hairpins. In a further embodiment of the disclosure, the transcript has at most five hairpins. In some embodiments, the single transcript further includes a transcription termination sequence; preferably this is a polyT sequence, for example six T nucleotides. Further non-limiting examples of single polynucleotides comprising a guide sequence, a tracr mate sequence, and a tracr sequence are as follows (listed 5′ to 3′), where “N” represents a base of a guide sequence, the first block of lower case letters represent the tracr mate sequence, and the second block of lower case letters represent the tracr sequence, and the final poly-T sequence represents the transcription terminator:

(1)
(SEQ ID NO: 146)
NNNNNNNNgtttttgtactctcaagatttaGAAAtaaatcttgcagaagct
acaaagataaggcttcatgccgaaatcaacaccctgtcattttatggcagg
gtgttttcgttatttaaTTTTTT;
(2)
(SEQ ID NO: 147)
NNNNNNNNNNNNNNNNNNgtttttgtactctcaGAAAtgcagaagctacaa
agataaggcttcatgccgaaatca acaccctgtcattttatggcagggt
gttttcgttatttaaTTTTTT;
(3)
(SEQ ID NO: 148)
NNNNNNNNNNNNNNNNNNNNgtttttgtactctcaGAAAtgcagaagctac
aaagataaggcttcatgccgaaatca acaccctgtcattttatggcagg
gtgtTTTTT;
(4)
(SEQ ID NO: 149)
NNNNNNNNNNNNNNNNNNNNgttttagagctaGAAAtagcaagttaaaata
aggctagtccgttatcaacttgaaaa agtggcaccgagtcggtgcTTTT
TT;
(5)
(SEQ ID NO: 150)
NNNNNNNNNNNNNNNNNNNNgttttagagctaGAAATAGcaagttaaaata
aggctagtccgttatcaacttgaa aaagtgTTTTTTT;
and
(6)
(SEQ ID NO: 151)
NNNNNNNNNNNNNNNNNNNNgttttagagctagAAATAGcaagttaaaata
aggctagtccgttatcaTTTTT TTT.

[0326] In some embodiments, sequences (1) to (3) are used in combination with Cas9 from S. thermophilus CRISPR1. In some embodiments, sequences (4) to (6) are used in combination with Cas9 from S. pyogenes. In some embodiments, the tracr sequence is a separate transcript from a transcript comprising the tracr mate sequence.

[0327] It will be apparent to those of skill in the art that in order to target any of the fusion proteins comprising a Cas9 domain and a thymine alkyltransferase, as disclosed herein, to a target site, e.g., a site comprising a point mutation to be edited, it is typically necessary to co-express the fusion protein together with a guide RNA, e.g., an sgRNA. As explained in more detail elsewhere herein, a guide RNA typically comprises a tracrRNA framework allowing for Cas9 binding, and a guide sequence, which confers sequence specificity to the Cas9:nucleic acid editing enzyme/domain fusion protein. In some embodiments, the guide RNA comprises a structure 5′-[guide sequence]-guuuuagagcuagaaauagcaaguuaaaauaaggcuaguccguuaucaacuugaaaaaguggcaccga gucggugcuuuuu-3′ (SEQ ID NO: 152), wherein the guide sequence comprises a sequence that is complementary to the target sequence. See U.S. Publication No. 2015/0166981, published Jun. 18, 2015, the disclosure of which is incorporated by reference herein in its entirety. The guide sequence is typically 20 nucleotides long.

[0328] The sequences of suitable guide RNAs for targeting Cas9:nucleic acid editing enzyme/domain fusion proteins to specific genomic target sites will be apparent to those of skill in the art based on the instant disclosure. Such suitable guide RNA sequences typically comprise guide sequences that are complementary to a nucleic sequence within 50 nucleotides upstream or downstream of the target nucleotide to be edited. Some exemplary guide RNA sequences suitable for targeting any of the provided fusion proteins to specific target sequences are provided herein. Additional guide sequences are well known in the art and can be used with the base editors described herein. Additional exemplary guide sequences are disclosed in, for example, Jinek M., et al., Science 337:816-821(2012); Mali P, Esvelt K M & Church G M (2013) Cas9 as a versatile tool for engineering biology, Nature Methods, 10, 957-963; Li J F et al., (2013) Multiplex and homologous recombination-mediated genome editing in Arabidopsis and Nicotiana benthamiana using guide RNA and Cas9, Nature Biotechnology, 31, 688-691; Hwang, W. Y. et al., Efficient genome editing in zebrafish using a CRISPR-Cas system, Nature Biotechnology 31, 227-229 (2013); Cong L et al., (2013) Multiplex genome engineering using CRIPSR/Cas systems, Science, 339, 819-823; Cho S W et al., (2013) Targeted genome engineering in human cells with the Cas9 RNA-guided endonuclease, Nature Biotechnology, 31, 230-232; Jinek, M. et al., RNA-programmed genome editing in human cells, eLife 2, e00471 (2013); Dicarlo, J. E. et al., Genome engineering in Saccharomyces cerevisiae using CRISPR-Cas systems. Nucleic Acid Res. (2013); Briner A E et al., (2014) Guide RNA functional modules direct Cas9 activity and orthogonality, Mol Cell, 56, 333-339, the entire contents of each of which are herein incorporated by reference.

### Base Editor Complexes

[0329] Further provided herein are complexes comprising (i) any of the fusion proteins provided herein, and (ii) a guide RNA bound to the Cas9 domain of the fusion protein. Without wishing to be bound by any particular theory, these fusion proteins can be directed by designing a suitable guide RNA to specifically and efficiently target single point mutations in a genome without introducing double-stranded DNA breaks or requiring homology directed repair (HDR). However, the suitability of a target site for base editing (e.g., a point mutation in the genome) is dependent on the presence of a suitably positioned PAM. The broaden PAM compatibility of the Cas9 domains provided herein has the potential to expand the targeting scope of base editors to those target sites that do not lie within approximately 15 nucleotides of a canonical 5′-NGG-3′ PAM sequence. A person of ordinary skill in the art will be able to design a suitable guide RNA (gRNA) sequence to target a desired point mutation based on this disclosure and knowledge in the field. In addition, these fusion proteins comprising a Cas9 domain generate fewer insertions and deletions (indels) and exhibit reduced off-target activity compared to fusion proteins (e.g., base editors) comprising a Cas9 domain that can only recognize the canonical 5′-NGG-3′ PAM sequence.

[0330] In some embodiments, the guide RNA is about 15-100 nucleotides long and comprises a sequence of at least 10 contiguous nucleotides that is complementary to a target sequence. In some embodiments, the guide RNA is 15, 16, 17, 18, 19, 20, 21, 22, 23, 24, 25, 26, 27, 28, 29, 30, 31, 32, 33, 34, 35, 36, 37, 38, 39, 40, 41, 42, 43, 44, 45, 46, 47, 48, 49, or 50 nucleotides long. In some embodiments, the guide RNA comprises a sequence of 15, 16, 17, 18, 19, 20, 21, 22, 23, 24, 25, 26, 27, 28, 29, 30, 31, 32, 33, 34, 35, 36, 37, 38, 39, or 40 contiguous nucleotides that is complementary to a target sequence. In some embodiments, the target sequence is a DNA sequence. In some embodiments, the target sequence is in the genome of an organism. In some embodiments, the organism is a prokaryote. In some embodiments, the prokaryote is a bacterium. In some embodiments, the bacterium is E. coli. In some embodiments, the organism is a eukaryote. In some embodiments, the organism is a plant or fungus. In some embodiments, the organism is a vertebrate. In some embodiments, the vertebrate is a mammal. In some embodiments, the mammal is a human. In some embodiments, the organism is a cell. In some embodiments, the cell is a human cell. In some embodiments, the cell is a HEK293T or U2OS cell.

[0331] In some embodiments, the target sequence comprises a sequence associated with a disease or disorder. In some embodiments, the target sequence comprises a point mutation associated with a disease or disorder. In some embodiments, the target sequence comprises a T→C point mutation. In some embodiments, the complex deaminates the target C point mutation, wherein the deamination results in a sequence that is not associated with a disease or disorder. In some embodiments, the target C point mutation is present in the DNA strand that is not complementary to the guide RNA. In some embodiments, the target sequence comprises a T→A point mutation. In some embodiments, the complex deaminates the target A point mutation, and wherein the deamination results in a sequence that is not associated with a disease or disorder. In some embodiments, the target A point mutation is present in the DNA strand that is not complementary to the guide RNA.

[0332] In some embodiments, the complex edits a point mutation in the target sequence. In some embodiments, the point mutation is located between about 10 to about 20 nucleotides upstream of the PAM in the target sequence. In some embodiments, the point mutation is located between about 13 to about 17 nucleotides upstream of the PAM in the target sequence. In some embodiments, the point mutation is about 13 nucleotides upstream of the PAM. In some embodiments, the point mutation is about 14 nucleotides upstream of the PAM. In some embodiments, the point mutation is about 15 nucleotides upstream of the PAM. In some embodiments, the point mutation is about 16 nucleotides upstream of the PAM. In some embodiments, the point mutation is about 17 nucleotides upstream of the PAM.

[0333] In some embodiments, the complex exhibits increased deamination efficiency of a point mutation in a target sequence that does not comprise the canonical PAM (5′-NGG-3′) at its 3′ end as compared to the deamination efficiency of a complex comprising Streptococcus pyogenes Cas9 as provided by SEQ ID NO: 2. In some embodiments, the complex exhibits increased deamination efficiency of a point mutation in a target sequence having a 3′ end that is not directly adjacent to the canonical PAM sequence (5′-NGG-3′) that is at least 2-fold, at least 3-fold, at least 4-fold, at least 5-fold, at least 10-fold, at least 50-fold, at least 100-fold, at least 500-fold, at least 1,000-fold, at least 5,000-fold, at least 10,000-fold, at least 50,000-fold, at least 100,000-fold, at least 500,000-fold, or at least 1,000,000-fold increased as compared to the deamination efficiency of complex comprising the Streptococcus pyogenes Cas9 as provided by SEQ ID NO: 2 on the same target sequence. In some embodiments, the 3′ end of the target sequence is directly adjacent to a sequence selected from the group consisting of NGT, NGA, NGC, and NNG, wherein N is an A, G, T, or C. In some embodiments, the 3′ end of the target sequence is directly adjacent to a sequence selected from the group consisting of CGG, AGT, TGG, AGT, CGT, GGG, CGT, TGT, GGT, AGC, CGC, TGC, GGC, AGA, CGA, TGA, GGA, GAA, GAT, and CAA. In some embodiments, deamination activity is measured using high-throughput sequencing.

[0334] In some embodiments, the complex produces fewer indels in a target sequence that does not comprise the canonical PAM (5′-NGG-3′) at its 3′ end as compared to the amount of indels produced by a complex comprising Streptococcus pyogenes Cas9 as provided by SEQ ID NO: 2. In some embodiments, the complex produces fewer indels in a target sequence having a 3′ end that is not directly adjacent to the canonical PAM sequence (5′-NGG-3′) that is at least 2-fold, at least 3-fold, at least 4-fold, at least 5-fold, at least 10-fold, at least 50-fold, at least 100-fold, at least 500-fold, at least 1,000-fold, at least 5,000-fold, at least 10,000-fold, at least 50,000-fold, at least 100,000-fold, at least 500,000-fold, or at least 1,000,000-fold lower as compared to the amount of indels produced by a complex comprising Streptococcus pyogenes Cas9 as provided by SEQ ID NO: 2 on the same target sequence. In some embodiments, the 3′ end of the target sequence is directly adjacent to a sequence selected from the group consisting of NGT, NGA, NGC, and NNG, wherein N is an A, G, T, or C. In some embodiments, the 3′ end of the target sequence is directly adjacent to a sequence selected from the group consisting of CGG, AGT, TGG, AGT, CGT, GGG, CGT, TGT, GGT, AGC, CGC, TGC, GGC, AGA, CGA, TGA, GGA, GAA, GAT, and CAA. In some embodiments, indels are measured using high-throughput sequencing.

[0335] In some embodiments, the complex exhibits a decreased off-target activity as compared to the off-target activity of a complex comprising Streptococcus pyogenes Cas9 as provided by SEQ ID NO: 2. In some embodiments, the off-target activity of the complex is at least 2-fold, at least 3-fold, at least 4-fold, at least 5-fold, at least 10-fold, at least 50-fold, at least 100-fold, at least 500-fold, at least 1,000-fold, at least 5,000-fold, at least 10,000-fold, at least 50,000-fold, at least 100,000-fold, at least 500,000-fold, or at least 1,000,000-fold decreased as compared to the off-target activity of a complex comprising Streptococcus pyogenes Cas9 as provided by SEQ ID NO: 2. In some embodiments, the off-target activity is determined using a genome-wide off-target analysis. In some embodiments, the off-target activity is determined using GUIDE-seq.

### Methods of Using Base Editors

[0336] Some aspects of this disclosure provide methods of using the Cas9 domains, fusion proteins, or complexes provided herein.

[0337] In one aspect, provided herein are methods comprising contacting a nucleic acid molecule (a) with any of the Cas9 domains or fusion proteins provided herein, and with at least one guide RNA, wherein the guide RNA is about 15-100 nucleotides long and comprises a sequence of at least 10 contiguous nucleotides that is complementary to a target sequence in the nucleic acid molecule; or (b) with a Cas9 domain, a fusion protein comprising a Cas9 domain, or a complex comprising a Cas9 domain, wherein the Cas9 domain is associated with at least one gRNA as provided herein. In some embodiments, the nucleic acid is present in a cell. In some embodiments, the nucleic acid is present in a subject. In some embodiments, the contacting is in vitro. In some embodiments, the contacting is in vivo in a subject.

[0338] In another aspect, provided herein are methods comprising contacting a cell (a) with any of the Cas9 domains or fusion proteins provided herein, and with at least one guide RNA, wherein the guide RNA is about 15-100 nucleotides long and comprises a sequence of at least 10 contiguous nucleotides that is complementary to a target sequence in the nucleic acid molecule; or (b) with a Cas9 domain, a fusion protein comprising a Cas9 domain, or a complex comprising a Cas9 domain, wherein the Cas9 domain is associated with at least one gRNA as provided herein. In some embodiments, the contacting is in vitro. In some embodiments, the contacting is in vivo in a subject. In some embodiments, the cell is a prokaryotic cell. In some embodiments, the prokaryotic cell is a bacterium. In some embodiments, the bacterium is E. coli. In some embodiments, the cell is a eukaryotic cell. In some embodiments, the eukaryotic cell is a mammalian cell. In some embodiments, the mammalian cell is a human cell. In some embodiments, the cell is a plant or fungal cell.

[0339] In another aspect, provided herein are methods for administering to a subject (a) any of the Cas9 domains or fusion proteins provided herein, and at least one guide RNA, wherein the guide RNA is about 15-100 nucleotides long and comprises a sequence of at least 10 contiguous nucleotides that is complementary to a target sequence in the nucleic acid molecule; or (b) a Cas9 domain, a fusion protein comprising a Cas9 domain, or a complex comprising a Cas9 domain, wherein the Cas9 domain is associated with at least one gRNA as provided herein. In some embodiments, an effective amount of the Cas9 domain, fusion protein, or complex is administered to the subject. In some embodiments, the effective amount is an amount effective for treating a disease or disorder, wherein the disease comprises one or more point mutations in a nucleic acid sequence associated with the disease or disorder.

[0340] In some embodiments, the 3′ end of the target sequence is not immediately adjacent to the canonical PAM sequence (5′-NGG-3′). In some embodiments, the 3′ end of the target sequence is directly adjacent to a sequence selected from the group consisting of NGT, NGA, NGC, and NNG, wherein N is an A, G, T, or C. In some embodiments, the 3′ end of the target sequence is directly adjacent to a sequence selected from the group consisting of CGG, AGT, TGG, AGT, CGT, GGG, CGT, TGT, GGT, AGC, CGC, TGC, GGC, AGA, CGA, TGA, GGA, GAA, GAT, and CAA.

[0341] In some embodiments, the target sequence comprises a sequence associated with a disease or disorder. In some embodiments, the target sequence comprises a point mutation associated with a disease or disorder. In some embodiments, the activity of the Cas9 domain, the Cas9 fusion protein, or the complex results in a correction of the point mutation. In some embodiments, the target sequence comprises a T→C point mutation associated with a disease or disorder, wherein the deamination of the mutant C base results in a sequence that is not associated with a disease or disorder. In some embodiments, the target sequence comprises a A→G, wherein deamination of the C that is base-paired to the mutant G base results in a sequence that is not associated with a disease or disorder. In some embodiments, the target sequence encodes a protein and wherein the point mutation is in a codon and results in a change in the amino acid encoded by the mutant codon as compared to the wild-type codon. In some embodiments, the deamination of the mutant C results in a change of the amino acid encoded by the mutant codon. In some embodiments, the deamination of the mutant C results in the codon encoding the wild-type amino acid. In some embodiments, the target DNA sequence comprises a G→A point mutation associated with a disease or disorder, and wherein the deamination of the mutant A base results in a sequence that is not associated with a disease or disorder. In some embodiments, the target DNA sequence comprises a C→T point mutation associated with a disease or disorder, wherein deamination of the A that is base-paired with the mutant T results in a sequence that is not associated with a disease or disorder. In some embodiments, the target DNA sequence encodes a protein and wherein the point mutation is in a codon and results in a change in the amino acid encoded by the mutant codon as compared to the wild-type codon. In some embodiments, the deamination of the mutant A results in a change of the amino acid encoded by the mutant codon. In some embodiments, the deamination of the mutant A results in the codon encoding the wild-type amino acid. In some embodiments, the contacting is in vivo in a subject. In some embodiments, the subject has or has been diagnosed with a disease or disorder. In some embodiments, the disease or disorder is cystic fibrosis, phenylketonuria, epidermolytic hyperkeratosis (EHK), Charcot-Marie-Toot disease type 4J, neuroblastoma (NB), von Willebrand disease (vWD), myotonia congenital, hereditary renal amyloidosis, dilated cardiomyopathy (DCM), hereditary lymphedema, familial Alzheimer's disease, HIV, Prion disease, chronic infantile neurologic cutaneous articular syndrome (CINCA), desmin-related myopathy (DRM), a neoplastic disease associated with a mutant PI3KCA protein, a mutant CTNNB1 protein, a mutant HRAS protein, or a mutant p53 protein. In some embodiments, the target sequence comprises a sequence located in a genomic locus. In some embodiments, the genomic locus is a HEK site. In some embodiments, the HEK site is HEK site 3 or HEK site 4. In some embodiments, the HEK site comprises a CGG, GGG, TGT, GGT, AGC, CGC, TGC, AGA, or TGA PAM sequence. In some embodiments, the genomic locus is EMX1. In some embodiments, the EMX1 locus comprises a GGG or CAA PAM sequence. In some embodiments, the genomic locus is VEGFA. In some embodiments, the VEGFA locus comprises a AGT, GGC, GGA, or GAT PAM sequence. In some embodiments, the genomic locus is FANCF. In some embodiments, the FANCF locus comprises a CGT, GAA, GAT, TGG, AGT, TGT, GGT, CGC, TGC, GGC, AGA, or TGA PAM sequence.

[0342] Some embodiments provide methods for using the Cas9 DNA editing fusion proteins provided herein. In some embodiments, the fusion protein is used to introduce a point mutation into a nucleic acid by deaminating a target nucleobase, e.g., a C or A residue. In some embodiments, the deamination of the target nucleobase results in the correction of a genetic defect, e.g., in the correction of a point mutation that leads to a loss of function in a gene product. In some embodiments, the genetic defect is associated with a disease or disorder, e.g., a lysosomal storage disorder or a metabolic disease, such as, for example, type I diabetes. In some embodiments, the methods provided herein are used to introduce a deactivating point mutation into a gene or allele that encodes a gene product that is associated with a disease or disorder. For example, in some embodiments, methods are provided herein that employ a fusion protein comprising a Cas9 domain (e.g., a base editor) to introduce a deactivating point mutation into an oncogene (e.g., in the treatment of a proliferative disease). A deactivating mutation may, in some embodiments, generate a premature stop codon in a coding sequence, which results in the expression of a truncated gene product, e.g., a truncated protein lacking the function of the full-length protein.

[0343] In some embodiments, the purpose of the methods provide herein is to restore the function of a dysfunctional gene via genome editing. The Cas9-deaminase fusion proteins provided herein can be validated for gene editing-based human therapeutics in vitro, e.g., by correcting a disease-associated mutation in human cell culture. It will be understood by the skilled artisan that the fusion proteins provided herein, e.g., the fusion proteins comprising a Cas9 domain and a cytidine deaminase domain can be used to correct any single T→C or A→G point mutation. In the first case, deamination of the mutant C back to U corrects the mutation, and in the latter case, deamination of the C that is base-paired with the mutant G, followed by a round of replication, corrects the mutation. The fusion proteins comprising a Cas9 domain and one or more adenosine deaminase domains can be used to correct any single G→A or C→T point mutation. In the first case, deamination of the mutant A to I corrects the mutation, and in the latter case, deamination of the A that is base-paired with the mutant T, followed by a round of replication, corrects the mutation.

[0344] An exemplary disease-relevant mutation that can be corrected by the provided fusion proteins in vitro or in vivo is the H1047R (A3140G) polymorphism in the PI3KCA protein. The phosphoinositide-3-kinase, catalytic alpha subunit (PI3KCA) protein acts to phosphorylate the 3-OH group of the inositol ring of phosphatidylinositol. The PI3KCA gene has been found to be mutated in many different carcinomas, and thus it is considered to be a potent oncogene.⁵⁰ In fact, the A3140G mutation is present in several NCI-60 cancer cell lines, such as, for example, the HCT116, SKOV3, and T47D cell lines, which are readily available from the American Type Culture Collection (ATCC).⁵¹

[0345] In some embodiments, a cell carrying a mutation to be corrected, e.g., a cell carrying a point mutation, e.g., an A3140G point mutation in exon 20 of the PI3KCA gene, resulting in a H1047R substitution in the PI3KCA protein, is contacted with an expression construct encoding a Cas9 deaminase fusion protein and an appropriately designed sgRNA targeting the fusion protein to the respective mutation site in the encoding PI3KCA gene. Control experiments can be performed where the sgRNAs are designed to target the fusion enzymes to non-C residues that are within the PI3KCA gene. Genomic DNA of the treated cells can be extracted, and the relevant sequence of the PI3KCA genes PCR amplified and sequenced to assess the activities of the fusion proteins in human cell culture.

[0346] It will be understood that the example of correcting point mutations in PI3KCA is provided for illustration purposes and is not meant to limit the instant disclosure. The skilled artisan will understand that the instantly disclosed DNA-editing fusion proteins can be used to correct other point mutations and mutations associated with other cancers and with diseases other than cancer including other proliferative diseases.

[0347] The successful correction of point mutations in disease-associated genes and alleles opens up new strategies for gene correction with applications in therapeutics and basic research. Site-specific single-base modification systems like the disclosed fusions of Cas9 domains and deaminase domains also have applications in “reverse” gene therapy, where certain gene functions are purposely suppressed or abolished. In these cases, site-specifically mutating Trp (TGG), Gln (CAA and CAG), or Arg (CGA) residues to premature stop codons (TAA, TAG, TGA) can be used to abolish protein function in vitro, ex vivo, or in vivo.

[0348] The instant disclosure provides methods for the treatment of a subject diagnosed with a disease associated with or caused by a point mutation that can be corrected by a fusion protein comprising a Cas9 domain and nucleic acid editing domain (e.g., a deaminase domain) provided herein. For example, in some embodiments, a method is provided that comprises administering to a subject having such a disease, e.g., a cancer associated with a PI3KCA point mutation as described above, an effective amount of a Cas9 deaminase fusion protein that corrects the point mutation or introduces a deactivating mutation into the disease-associated gene. In some embodiments, the disease is a proliferative disease. In some embodiments, the disease is a genetic disease. In some embodiments, the disease is a neoplastic disease. In some embodiments, the disease is a metabolic disease. In some embodiments, the disease is a lysosomal storage disease. Other diseases that can be treated by correcting a point mutation or introducing a deactivating mutation into a disease-associated gene will be known to those of skill in the art, and the disclosure is not limited in this respect.

[0349] The instant disclosure provides methods for the treatment of additional diseases or disorders, e.g., diseases or disorders that are associated or caused by a point mutation that can be corrected by deaminase-mediated gene editing. Some such diseases are described herein, and additional suitable diseases that can be treated with the strategies and fusion proteins provided herein will be apparent to those of skill in the art based on the instant disclosure. Exemplary suitable diseases and disorders are listed below. It will be understood that the numbering of the specific positions or residues in the respective sequences depends on the particular protein and numbering scheme used. Numbering might be different, e.g., in precursors of a mature protein and the mature protein itself, and differences in sequences from species to species may affect numbering. One of skill in the art will be able to identify the respective residue in any homologous protein and in the respective encoding nucleic acid by methods well known in the art, e.g., by sequence alignment and determination of homologous residues. Exemplary suitable diseases and disorders include, without limitation, cystic fibrosis (see, e.g., Schwank et al., Functional repair of CFTR by CRISPR/Cas9 in intestinal stem cell organoids of cystic fibrosis patients. Cell stem cell. 2013; 13: 653-658; and Wu et. al., Correction of a genetic disease in mouse via use of CRISPR-Cas9. Cell stem cell. 2013; 13: 659-662, neither of which uses a deaminase fusion protein to correct the genetic defect); phenylketonuria—e.g., phenylalanine to serine mutation at position 835 (mouse) or 240 (human) or a homologous residue in phenylalanine hydroxylase gene (T>C mutation)—see, e.g., McDonald et al., Genomics. 1997; 39:402-405; Bernard-Soulier syndrome (BSS)—e.g., phenylalanine to serine mutation at position 55 or a homologous residue, or cysteine to arginine at residue 24 or a homologous residue in the platelet membrane glycoprotein IX (T>C mutation)—see, e.g., Noris et al., British Journal of Haematology. 1997; 97: 312-320, and Ali et al., Hematol. 2014; 93: 381-384; epidermolytic hyperkeratosis (EHK)—e.g., leucine to proline mutation at position 160 or 161 (if counting the initiator methionine) or a homologous residue in keratin 1 (T>C mutation)—see, e.g., Chipev et al., Cell. 1992; 70: 821-828, see also accession number P04264 in the UNIPROT database at www [dot]uniprot [dot]org; chronic obstructive pulmonary disease (COPD)—e.g., leucine to proline mutation at position 54 or 55 (if counting the initiator methionine) or a homologous residue in the processed form of α₁-antitrypsin or residue 78 in the unprocessed form or a homologous residue (T>C mutation)—see, e.g., Poller et al., Genomics. 1993; 17: 740-743, see also accession number P01011 in the UNIPROT database; Charcot-Marie-Toot disease type 4J—e.g., isoleucine to threonine mutation at position 41 or a homologous residue in FIG. 4 (T>C mutation)—see, e.g., Lenk et al., PLoS Genetics. 2011; 7: e1002104; neuroblastoma (NB)—e.g., leucine to proline mutation at position 197 or a homologous residue in Caspase-9 (T>C mutation)—see, e.g., Kundu et al., 3 Biotech. 2013, 3:225-234; von Willebrand disease (vWD)—e.g., cysteine to arginine mutation at position 509 or a homologous residue in the processed form of von Willebrand factor, or at position 1272 or a homologous residue in the unprocessed form of von Willebrand factor (T>C mutation)—see, e.g., Lavergne et al., Br J. Haematol. 1992, see also accession number P04275 in the UNIPROT database; 82: 66-72; myotonia congenital—e.g., cysteine to arginine mutation at position 277 or a homologous residue in the muscle chloride channel gene CLCN1 (T>C mutation)—see, e.g., Weinberger et al., The J. of Physiology. 2012; 590: 3449-3464; hereditary renal amyloidosis—e.g., stop codon to arginine mutation at position 78 or a homologous residue in the processed form of apolipoprotein AII or at position 101 or a homologous residue in the unprocessed form (T>C mutation)—see, e.g., Yazaki et al., Kidney Int. 2003; 64: 11-16; dilated cardiomyopathy (DCM)—e.g., tryptophan to Arginine mutation at position 148 or a homologous residue in the FOXD4 gene (T>C mutation), see, e.g., Minoretti et. al., Int. J. of Mol. Med. 2007; 19: 369-372; hereditary lymphedema—e.g., histidine to arginine mutation at position 1035 or a homologous residue in VEGFR3 tyrosine kinase (A>G mutation), see, e.g., Irrthum et al., Am. J. Hum. Genet. 2000; 67: 295-301; familial Alzheimer's disease—e.g., isoleucine to valine mutation at position 143 or a homologous residue in presenilin1 (A>G mutation), see, e.g., Gallo et. al., J. Alzheimer's disease. 2011; 25: 425-431; Prion disease—e.g., methionine to valine mutation at position 129 or a homologous residue in prion protein (A>G mutation)—see, e.g., Lewis et. al., J. of General Virology. 2006; 87: 2443-2449; chronic infantile neurologic cutaneous articular syndrome (CINCA)—e.g., Tyrosine to Cysteine mutation at position 570 or a homologous residue in cryopyrin (A>G mutation)—see, e.g., Fujisawa et. al. Blood. 2007; 109: 2903-2911; and desmin-related myopathy (DRM)—e.g., arginine to glycine mutation at position 120 or a homologous residue in aB crystallin (A>G mutation)—see, e.g., Kumar et al., J. Biol. Chem. 1999; 274: 24137-24141. The entire contents of all references and database entries is incorporated herein by reference.

### Pharmaceutical Compositions

[0350] Other aspects of the present disclosure relate to pharmaceutical compositions comprising any of the various components described herein (e.g., including, but not limited to, the napDNAbps, fusion proteins, guide RNAs, and complexes comprising fusion proteins and guide RNAs).

[0351] The term “pharmaceutical composition”, as used herein, refers to a composition formulated for pharmaceutical use. In some embodiments, the pharmaceutical composition further comprises a pharmaceutically acceptable carrier. In some embodiments, the pharmaceutical composition comprises additional agents (e.g. for specific delivery, increasing half-life, or other therapeutic compounds).

[0352] As used here, the term “pharmaceutically-acceptable carrier” means a pharmaceutically-acceptable material, composition or vehicle, such as a liquid or solid filler, diluent, excipient, manufacturing aid (e.g., lubricant, talc magnesium, calcium or zinc stearate, or steric acid), or solvent encapsulating material, involved in carrying or transporting the compound from one site (e.g., the delivery site) of the body, to another site (e.g., organ, tissue or portion of the body). A pharmaceutically acceptable carrier is “acceptable” in the sense of being compatible with the other ingredients of the formulation and not injurious to the tissue of the subject (e.g., physiologically compatible, sterile, physiologic pH, etc.). Some examples of materials which can serve as pharmaceutically-acceptable carriers include: (1) sugars, such as lactose, glucose and sucrose; (2) starches, such as corn starch and potato starch; (3) cellulose, and its derivatives, such as sodium carboxymethyl cellulose, methylcellulose, ethyl cellulose, microcrystalline cellulose and cellulose acetate; (4) powdered tragacanth; (5) malt; (6) gelatin; (7) lubricating agents, such as magnesium stearate, sodium lauryl sulfate and talc; (8) excipients, such as cocoa butter and suppository waxes; (9) oils, such as peanut oil, cottonseed oil, safflower oil, sesame oil, olive oil, corn oil and soybean oil; (10) glycols, such as propylene glycol; (11) polyols, such as glycerin, sorbitol, mannitol and polyethylene glycol (PEG); (12) esters, such as ethyl oleate and ethyl laurate; (13) agar; (14) buffering agents, such as magnesium hydroxide and aluminum hydroxide; (15) alginic acid; (16) pyrogen-free water; (17) isotonic saline; (18) Ringer's solution; (19) ethyl alcohol; (20) pH buffered solutions; (21) polyesters, polycarbonates and/or polyanhydrides; (22) bulking agents, such as polypeptides and amino acids (23) serum component, such as serum albumin, HDL and LDL; (22) C2-C12 alcohols, such as ethanol; and (23) other non-toxic compatible substances employed in pharmaceutical formulations. Wetting agents, coloring agents, release agents, coating agents, sweetening agents, flavoring agents, perfuming agents, preservative and antioxidants can also be present in the formulation. The terms such as “excipient”, “carrier”, “pharmaceutically acceptable carrier” or the like are used interchangeably herein.

[0353] In some embodiments, the pharmaceutical composition is formulated for delivery to a subject, e.g., for gene editing. Suitable routes of administrating the pharmaceutical composition described herein include, without limitation: topical, subcutaneous, transdermal, intradermal, intralesional, intraarticular, intraperitoneal, intravesical, transmucosal, gingival, intradental, intracochlear, transtympanic, intraorgan, epidural, intrathecal, intramuscular, intravenous, intravascular, intraosseus, periocular, intratumoral, intracerebral, and intracerebroventricular administration.

[0354] In some embodiments, the pharmaceutical composition described herein is administered locally to a diseased site (e.g., tumor site). In some embodiments, the pharmaceutical composition described herein is administered to a subject by injection, by means of a catheter, by means of a suppository, or by means of an implant, the implant being of a porous, non-porous, or gelatinous material, including a membrane, such as a sialastic membrane, or a fiber.

[0355] In other embodiments, the pharmaceutical composition described herein is delivered in a controlled release system. In one embodiment, a pump may be used (see, e.g., Langer, 1990, Science 249:1527-1533; Sefton, 1989, CRC Crit. Ref. Biomed. Eng. 14:201; Buchwald et al., 1980, Surgery 88:507; Saudek et al., 1989, N. Engl. J. Med. 321:574). In another embodiment, polymeric materials can be used. (See, e.g., Medical Applications of Controlled Release (Langer and Wise eds., CRC Press, Boca Raton, Fla., 1974); Controlled Drug Bioavailability, Drug Product Design and Performance (Smolen and Ball eds., Wiley, New York, 1984); Ranger and Peppas, 1983, Macromol. Sci. Rev. Macromol. Chem. 23:61. See also Levy et al., 1985, Science 228:190; During et al., 1989, Ann. Neurol. 25:351; Howard et al., 1989, J. Neurosurg. 71:105.) Other controlled release systems are discussed, for example, in Langer, supra.

[0356] In some embodiments, the pharmaceutical composition is formulated in accordance with routine procedures as a composition adapted for intravenous or subcutaneous administration to a subject, e.g., a human. In some embodiments, pharmaceutical composition for administration by injection are solutions in sterile isotonic aqueous buffer. Where necessary, the pharmaceutical can also include a solubilizing agent and a local anesthetic such as lignocaine to ease pain at the site of the injection. Generally, the ingredients are supplied either separately or mixed together in unit dosage form, for example, as a dry lyophilized powder or water free concentrate in a hermetically sealed container such as an ampoule or sachette indicating the quantity of active agent. Where the pharmaceutical is to be administered by infusion, it can be dispensed with an infusion bottle containing sterile pharmaceutical grade water or saline. Where the pharmaceutical composition is administered by injection, an ampoule of sterile water for injection or saline can be provided so that the ingredients can be mixed prior to administration.

[0357] A pharmaceutical composition for systemic administration may be a liquid, e.g., sterile saline, lactated Ringer's or Hank's solution. In addition, the pharmaceutical composition can be in solid forms and re-dissolved or suspended immediately prior to use. Lyophilized forms are also contemplated.

[0358] The pharmaceutical composition can be contained within a lipid particle or vesicle, such as a liposome or microcrystal, which is also suitable for parenteral administration. The particles can be of any suitable structure, such as unilamellar or plurilamellar, so long as compositions are contained therein. Compounds can be entrapped in “stabilized plasmid-lipid particles” (SPLP) containing the fusogenic lipid dioleoylphosphatidylethanolamine (DOPE), low levels (5-10 mol %) of cationic lipid, and stabilized by a polyethyleneglycol (PEG) coating (Zhang Y. P. et al., Gene Ther. 1999, 6:1438-47). Positively charged lipids such as N-[1-(2,3-dioleoyloxi)propyl]-N,N,N-trimethyl-amoniummethylsulfate, or “DOTAP,” are particularly preferred for such particles and vesicles. The preparation of such lipid particles is well known. See, e.g., U.S. Pat. Nos. 4,880,635; 4,906,477; 4,911,928; 4,917,951; 4,920,016; and 4,921,757; each of which is incorporated herein by reference.

[0359] The pharmaceutical composition described herein may be administered or packaged as a unit dose, for example. The term “unit dose” when used in reference to a pharmaceutical composition of the present disclosure refers to physically discrete units suitable as unitary dosage for the subject, each unit containing a predetermined quantity of active material calculated to produce the desired therapeutic effect in association with the required diluent; i.e., carrier, or vehicle.

[0360] Further, the pharmaceutical composition can be provided as a pharmaceutical kit comprising (a) a container containing a compound of the invention in lyophilized form and (b) a second container containing a pharmaceutically acceptable diluent (e.g., sterile water) for injection. The pharmaceutically acceptable diluent can be used for reconstitution or dilution of the lyophilized compound of the invention. Optionally associated with such container(s) can be a notice in the form prescribed by a governmental agency regulating the manufacture, use or sale of pharmaceuticals or biological products, which notice reflects approval by the agency of manufacture, use or sale for human administration.

[0361] In another aspect, an article of manufacture containing materials useful for the treatment of the diseases described above is included. In some embodiments, the article of manufacture comprises a container and a label. Suitable containers include, for example, bottles, vials, syringes, and test tubes. The containers may be formed from a variety of materials such as glass or plastic. In some embodiments, the container holds a composition that is effective for treating a disease described herein and may have a sterile access port. For example, the container may be an intravenous solution bag or a vial having a stopper pierceable by a hypodermic injection needle. The active agent in the composition is a compound of the invention. In some embodiments, the label on or associated with the container indicates that the composition is used for treating the disease of choice. The article of manufacture may further comprise a second container comprising a pharmaceutically-acceptable buffer, such as phosphate-buffered saline, Ringer's solution, or dextrose solution. It may further include other materials desirable from a commercial and user standpoint, including other buffers, diluents, filters, needles, syringes, and package inserts with instructions for use.

### Delivery Methods

[0362] In some aspects, the invention provides methods comprising delivering one or more polynucleotides, such as or one or more vectors as described herein encoding one or more components described herein, one or more transcripts thereof, and/or one or proteins transcribed therefrom, to a host cell. In some aspects, the invention further provides cells produced by such methods, and organisms (such as animals, plants, or fungi) comprising or produced from such cells. In some embodiments, a base editor as described herein in combination with (and optionally complexed with) a guide sequence is delivered to a cell. Conventional viral and non-viral based gene transfer methods can be used to introduce nucleic acids in mammalian cells or target tissues. Such methods can be used to administer nucleic acids encoding components of a base editor to cells in culture, or in a host organism. Non-viral vector delivery systems include DNA plasmids, RNA (e.g. a transcript of a vector described herein), naked nucleic acid, and nucleic acid complexed with a delivery vehicle, such as a liposome. Viral vector delivery systems include DNA and RNA viruses, which have either episomal or integrated genomes after delivery to the cell. For a review of gene therapy procedures, see Anderson, Science 256:808-813 (1992); Nabel & Felgner, TIBTECH 11:211-217 (1993); Mitani & Caskey, TIBTECH 11:162-166 (1993); Dillon, TIBTECH 11:167-175 (1993); Miller, Nature 357:455-460 (1992); Van Brunt, Biotechnology 6(10):1149-1154 (1988); Vigne, Restorative Neurology and Neuroscience 8:35-36 (1995); Kremer & Perricaudet, British Medical Bulletin 51(1):31-44 (1995); Haddada et al., in Current Topics in Microbiology and Immunology Doerfler and Bihm (eds) (1995); and Yu et al., Gene Therapy 1:13-26 (1994).

[0363] Methods of non-viral delivery of nucleic acids include lipofection, nucleofection, microinjection, biolistics, virosomes, liposomes, immunoliposomes, polycation or lipid:nucleic acid conjugates, naked DNA, artificial virions, and agent-enhanced uptake of DNA. Lipofection is described in e.g., U.S. Pat. Nos. 5,049,386, 4,946,787; and 4,897,355) and lipofection reagents are sold commercially (e.g., Transfectam™ and Lipofectin™). Cationic and neutral lipids that are suitable for efficient receptor-recognition lipofection of polynucleotides include those of Feigner, WO 91/17424; WO 91/16024. Delivery can be to cells (e.g. in vitro or ex vivo administration) or target tissues (e.g. in vivo administration). The preparation of lipid:nucleic acid complexes, including targeted liposomes such as immunolipid complexes, is well known to one of skill in the art (see, e.g., Crystal, Science 270:404-410 (1995); Blaese et al., Cancer Gene Ther. 2:291-297 (1995); Behr et al., Bioconjugate Chem. 5:382-389 (1994); Remy et al., Bioconjugate Chem. 5:647-654 (1994); Gao et al., Gene Therapy 2:710-722 (1995); Ahmad et al., Cancer Res. 52:4817-4820 (1992); U.S. Pat. Nos. 4,186,183, 4,217,344, 4,235,871, 4,261,975, 4,485,054, 4,501,728, 4,774,085, 4,837,028, and 4,946,787).

[0364] The use of RNA or DNA viral based systems for the delivery of nucleic acids take advantage of highly evolved processes for targeting a virus to specific cells in the body and trafficking the viral payload to the nucleus. Viral vectors can be administered directly to patients (in vivo) or they can be used to treat cells in vitro, and the modified cells may optionally be administered to patients (ex vivo). Conventional viral based systems could include retroviral, lentivirus, adenoviral, adeno-associated and herpes simplex virus vectors for gene transfer. Integration in the host genome is possible with the retrovirus, lentivirus, and adeno-associated virus gene transfer methods, often resulting in long term expression of the inserted transgene. Additionally, high transduction efficiencies have been observed in many different cell types and target tissues.

[0365] The tropism of a viruses can be altered by incorporating foreign envelope proteins, expanding the potential target population of target cells. Lentiviral vectors are retroviral vectors that are able to transduce or infect non-dividing cells and typically produce high viral titers. Selection of a retroviral gene transfer system would therefore depend on the target tissue. Retroviral vectors are comprised of cis-acting long terminal repeats with packaging capacity for up to 6-10 kb of foreign sequence. The minimum cis-acting LTRs are sufficient for replication and packaging of the vectors, which are then used to integrate the therapeutic gene into the target cell to provide permanent transgene expression. Widely used retroviral vectors include those based upon murine leukemia virus (MuLV), gibbon ape leukemia virus (GaLV), Simian Immuno deficiency virus (SIV), human immuno deficiency virus (HIV), and combinations thereof (see, e.g., Buchscher et al., J. Virol. 66:2731-2739 (1992); Johann et al., J. Virol. 66:1635-1640 (1992); Sommnerfelt et al., Virol. 176:58-59 (1990); Wilson et al., J. Virol. 63:2374-2378 (1989); Miller et al., J. Virol. 65:2220-2224 (1991); PCT/US94/05700). In applications where transient expression is preferred, adenoviral based systems may be used. Adenoviral based vectors are capable of very high transduction efficiency in many cell types and do not require cell division. With such vectors, high titer and levels of expression have been obtained. This vector can be produced in large quantities in a relatively simple system. Adeno-associated virus (“AAV”) vectors may also be used to transduce cells with target nucleic acids, e.g., in the in vitro production of nucleic acids and peptides, and for in vivo and ex vivo gene therapy procedures (see, e.g., West et al., Virology 160:38-47 (1987); U.S. Pat. No. 4,797,368; WO 93/24641; Kotin, Human Gene Therapy 5:793-801 (1994); Muzyczka, J. Clin. Invest. 94:1351 (1994). Construction of recombinant AAV vectors are described in a number of publications, including U.S. Pat. No. 5,173,414; Tratschin et al., Mol. Cell. Biol. 5:3251-3260 (1985); Tratschin, et al., Mol. Cell. Biol. 4:2072-2081 (1984); Hermonat & Muzyczka, PNAS 81:6466-6470 (1984); and Samulski et al., J. Virol. 63:03822-3828 (1989).

[0366] Packaging cells are typically used to form virus particles that are capable of infecting a host cell. Such cells include 293 cells, which package adenovirus, and ψ2 cells or PA317 cells, which package retrovirus. Viral vectors used in gene therapy are usually generated by producing a cell line that packages a nucleic acid vector into a viral particle. The vectors typically contain the minimal viral sequences required for packaging and subsequent integration into a host, other viral sequences being replaced by an expression cassette for the polynucleotide(s) to be expressed. The missing viral functions are typically supplied in trans by the packaging cell line. For example, AAV vectors used in gene therapy typically only possess ITR sequences from the AAV genome which are required for packaging and integration into the host genome. Viral DNA is packaged in a cell line, which contains a helper plasmid encoding the other AAV genes, namely rep and cap, but lacking ITR sequences. The cell line may also be infected with adenovirus as a helper. The helper virus promotes replication of the AAV vector and expression of AAV genes from the helper plasmid. The helper plasmid is not packaged in significant amounts due to a lack of ITR sequences. Contamination with adenovirus can be reduced by, e.g., heat treatment to which adenovirus is more sensitive than AAV. Additional methods for the delivery of nucleic acids to cells are known to those skilled in the art. See, for example, US20030087817, incorporated herein by reference.

### Kits, Vectors, Cells

[0367] Some aspects of this disclosure provide kits comprising a nucleic acid construct, comprising (a) a nucleotide sequence encoding a Cas9 domain or a fusion protein comprising a Cas9 domain as provided herein; and (b) a heterologous promoter that drives expression of the sequence of (a). In some embodiments, the kit further comprises an expression construct encoding a guide RNA backbone, wherein the construct comprises a cloning site positioned to allow the cloning of a nucleic acid sequence identical or complementary to a target sequence into the guide RNA backbone.

[0368] Some aspects of this disclosure provide polynucleotides encoding a Cas9 domain or a fusion protein comprising a Cas9 domain as provided herein. Some aspects of this disclosure provide vectors comprising such polynucleotides. In some embodiments, the vector comprises a heterologous promoter driving expression of polynucleotide.

[0369] In one aspect, provided herein are methods comprising contacting a cell with a kit provided herein. In another aspect, provided herein are methods comprising contacting a cell with a vector provided herein. In some embodiments, the vector is transfected into the cell. In some embodiments, the vector is transfected into the cell using a suitable transfection reaction. Transfection reactions may be carried out, for example, using electroporation, heat shock, or a composition comprising a cationic lipid. Cationic lipids suitable for the transfection of nucleic acid molecules are provided in, for example, Patent Publication WO2015/035136, published Mar. 12, 2015, entitled “Delivery System for Functional Nucleases”; the entire contents of which is incorporated by reference herein.

[0370] Some aspects of this disclosure provide cells comprising a Cas9 domain, a fusion protein, a nucleic acid molecule, and/or a vector as provided herein.

[0371] The description of exemplary embodiments of the reporter systems (e.g., GFP) herein is provided for illustration purposes only and not meant to be limiting. Additional reporter systems, e.g., variations of the exemplary systems described in detail above, are also embraced by this disclosure.

### REFERENCES

[0372] 1. Komor, A. C., Kim, Y. B., Packer, M. S., Zuris, J. A. & Liu, D. R. Programmable editing of a target base in genomic DNA without double-stranded DNA cleavage. Nature 533, 420-424 (2016).
[0373] 2. Nishida, K. et al. Targeted nucleotide editing using hybrid prokaryotic and vertebrate adaptive immune systems. Science 353, 1248 (2016).
[0374] 3. Gaudelli, N. M. et al. Programmable base editing of A.T to G.C in genomic DNA without DNA cleavage. Nature 551, 464-471 (2017).
[0375] 4. Rees, H. A. et al. Improving the DNA specificity and applicability of base editing through protein engineering and protein delivery. Nat. Commun. 8, 15790 (2017).
[0376] 5. Kim, J.-S. Precision genome engineering through adenine and cytosine base editing. Nat. Plants 4, 148-151 (2018).

### EXAMPLES

### Example 1

[0377] Identification of PAM Sequences that SpCas9 and xCas9 have Low Activity

[0378] A key limitation to the use of CRISPR-Cas9 domains for genome editing and other applications is the requirement that a protospacer adjacent motif (PAM) be present at the target site. For the most commonly used Cas9 from Streptococcus pyogenes (SpCas9), this PAM requirement is NGG. No natural or engineered Cas9 variants shown to function efficiently in mammalian cells offer a PAM less restrictive than NGG. Phage-assisted continuous evolution (PACE) was used to evolve the wild type SpCas9 and an expanded PAM SpCas9 variant (xCas9) that can recognize a broad range of PAM sequences. The PAM compatibility of xCas9 is the broadest reported to date among Cas9s active in mammalian cells, and supports applications in human cells including targeted transcriptional activation, nuclease-mediated gene disruption, and both cytidine and adenine base editing.

[0379] Here, phage-assisted continuous evolution (PACE) is used for identification on PAMs that spCas9 and xCas9 have low activity. During PACE, host E. coli cells continuously dilute an evolving population of bacteriophages (selection phage, SP). Since dilution occurs faster than cell division but slower than phage replication, only the SP, and not the host cells, can accumulate mutations. Each SP carries a gene to be evolved instead of a phage gene (gene III) that is required for the production of infectious progeny phage. SP containing desired gene variants trigger host-cell gene III expression from the accessory plasmid (AP) and the production of infectious SP that propagate the desired variants. Phage encoding inactive variants do not generate infectious progeny and are rapidly diluted out of the culture vessel (FIG. 1A). As phage replication can occur in as little as 10 minutes, PACE enables hundreds of generations of directed evolution to occur per week without researcher intervention.

[0380] To link Cas9 DNA recognition to phage propagation during PACE, a bacterial one-hybrid selection in which the SP encodes a catalytically dead SpCas9 (dCas9) fused to the ω subunit of bacterial RNA polymerase was developed (FIG. 1A). When this fusion binds an AP-encoded sgRNA and a PAM and protospacer upstream of gene III in the AP, RNA polymerase recruitment causes gene III expression and phage propagation (FIG. 1B). A library of all 64 possible NNN PAM sequences at the target protospacer in the AP, so that SP encoding Cas9 variants with broader PAM compatibility would replicate in a larger fraction of host cells and thus experience a fitness advantage, was generated. After overnight propagation. As expected, xCas9 are less stringent on PAM requirement. Both SpCas9 or xCas9 exhibited low activity on NAA, NAC, and NAT PAMs (FIG. 1C). The following experiments were designed to identify Cas9 variants that are able to bind to NAA, NAC, and NAT PAMs.

### Example 2

### Phage Assisted Non-Continuous Evolution (PANCE) of Cas9 Variants for Expanded PAM Compatibility

[0381] Phage-assisted non-continuous evolution (PANCE) system was used to further evolve SpCas9 and xCas9 for identification of Cas9 variants that can recognize non-NGG PAMs. In the PANCE system, the SP is iteratively passaged through serial dilution in host cells in order to evolve SpCas9 and/or xCas9 proteins that bind to all possible The PANCE system preferentially replicates Cas9 variants that bind a greater variety of PAM sequences, similar to PACE, but with lower stringency since there is no outflow of phage. Although lower in stringency, the PANCE system allows for higher throughput, enabling evolution towards multiple targets (e.g., NAA, NAC, NAT PAMS) simultaneously.

[0382] In this experiment, SPs were iteratively passaged through serial dilution in host cells to evolve either SpCas9 or xCas9 proteins capable of binding to all 16 NAN PAM target sequences. In PANCE, E. coli host cells transformed with an AP and mutagenesis plasmid (MP) or dilution plasmid (DP) are plated in individual wells of a multi-well plate and grown to log phase. Selection phages, are then introduced and mutagenesis is induced with arabinose or aTc. The SPs are then grown for at least 6 additional hours, before being collected and used to infect the next multi-well plate of E. coli host cells that have grown to log phase (FIG. 2A). Each one of these infection-incubation-collection cycles is referred to as a “passage”.

[0383] Increased recognition of non-NGG PAMs were observed in both SpCas9 and xCas9 as they were evolved through more passages in PANCE. FIG. 2B shows evolving SpCas9 and xCas9's ability to recognize all 64 PAMs for passage 2, passage 12 and passage 16. After performing 19 rounds of selection in PANCE and sequencing the surviving phage pools (FIG. 36), mutations largely differing according to the third base of the NAN PAM targeted for evolution were observed. For example, variants selected on NAA enriched for Gly, Ile, or Lys at position 1333, while those selected for NAT enriched for Gln or Leu at position 1335. Finally, variants evolved to bind NAC enriched simultaneously for Gln at position 1335 and Asn at position 1337.

[0384] The clones of mutated SpCas9 and xCas9 variants that were able to recognize NAA PAMs were isolated and sequenced for identification of mutations in Cas9. FIG. 3A shows mutations in SpCas9 at passage 12 that can recognize CAA, GAT, ATG, or AGC PAMs. FIG. 4A shows mutations in SpCas9 at passage 19 that can recognize ATG, CAA, or GAA PAMs. Further, the wild type SpCas9 clones, e.g., CAA-3, GAT-2, ATG-2, ATG-3, or AGC-3 in passage 12 were tested using the luciferase assay described above for their ability to recognize all 64 PAMs, as shown in FIG. 3B. Similarly, the wild type SpCas9 clones, e.g., CAA-1, CAA-2, GAA-1, GAA-2, GAC-5, GAT-1, GAT-3, AGC-1, AGC-3, AGC-6. ATG-3, or ATG-6 in passage 19 were tested using the luciferase assay described above for their ability to recognize all 64 PAMs, as shown in FIG. 4B.

[0385] Similarly, FIG. 5A shows mutations in xCas9 at passage 12 that can recognize TAT, GTA, or CAC PAMs, and FIG. 6A shows mutations in xCas9 at passage 19 that can recognize AAA, GCC, or TAA PAMs. Further, xCas9 mutant clones, e.g., TAT-1, TAT-3, GTA-1, GTA-3, or CAC-2 in passage 12 were tested using the luciferase assay described above for their ability to recognize all 64 PAMs, as shown in FIG. 5B. Similarly, xCas9 mutant clones, e.g., AAA-1, TAA-2, TAA-5, TAT-5, CAC-5, CAC-6, GTA-2, GTA-7, GCC-2, GCC-5, or GCC-8 in passage 18 were tested using the luciferase assay described above for their ability to recognize all 64 PAMs, as shown in FIG. 6B.

[0386] To test if mutations evolved during PANCE in bacteria are compatible with xCas9 function in mammalian cells, SpCas9 and xCas9 variants were characterized for their activity and PAM compatibility in human cells in two contexts: adenine base editing and genomic DNA cutting. Additionally, to further characterize genomic DNA cleavage in human cells by xCas9 variants, we targeted endogenous genomic sites in HEK293T cells and measured indel formation by high-throughput sequencing (HTS).

[0387] To evaluate C⋅G-to-T⋅A base editing activity of xCas9 variants, SpCas9 was substituted with xCas9 3.7 and 3.6 in the third-generation (BE3) base editor architecture. Both xCas9-BE3s were transfected into mammalian cells to compare editing efficiency. The xCas9-BE3 protein demonstrated base editing activity only on CGT and CGG PAMs, whereas the ATG2-BE3 protein demonstrated base editing activity on CAG and ATG PAMs, the CAA3-BE3 protein demonstrated base editing activity on CGG PAMs, and the TAT1-BE3 protein demonstrated base editing activity on CAT PAMs (FIG. 7).

[0388] The xCas9 protein produced indels in CAG, ATG, CAT, CGT, and CGG PAMs, whereas the ATG2 protein produced indels in CAG and CGG PAMs, the CAA3 protein produced indels in CAT and CGG PAMs, and the TAT1 protein produced indels in CAT PAMs (FIG. 7).

[0389] Thus, the PANCE evolved spCas9 variants have some activity in vitro on non-NGG PAMs.

[0390] Additionally, the xCas9-passage 12-TAT1 (N6) variant was subjected to further PANCE evolution. A comparison of xCas9-passage 12-TAT1 to SpCas9 in various amino acid residues was shown in FIG. 9A. The clones resulting from further PANCE evolution of the xCas9-passage 12-TAT1 (N6) variant are shown in FIGS. 10-11. FIG. 12 shows evolving's xCas9-passage 12-TAT1 variant's ability to recognize all 64 PAMs for passage 2, passage 12 and passage 16.

### Example 3

### Selection Improvement Allows the Evolution of NAA PAM Binding Activity

[0391] Despite enriching for multiple consensus mutations in the PAM-interacting domain (PID), (D1135N/E1219V/Q1221H/H1264Y/A1320V/R1333K), the NAA-targeted PANCE-evolved mutants exhibited low activity when subcloned into C to T base editors (CBEs) and tested for base conversion on sites containing NAA PAMs in mammalian cells (FIGS. 7, 37C). One possible explanation is that evolving increased binding activity might require increased selection stringency, and three strategies were implemented to accomplish this.

[0392] First, two variants evolved to bind a CAA PAM in the initial PANCE assay were selected and subjected to PACE using a dual-AP system. Here, each AP provides one half of slit-intein pIII under control of an orthogonal Cas9 1-hybrid circuit, requiring ω-dCas9 to successfully bind two distinct protospacer-PAM motifs to produce full-length pIII (FIGS. 13A, 13B, 37A). These experiments led to the acquisition of a few additional consensus mutations (FIGS. 14A, 37B). This in turn led to improvements in CBE on sites (FIGS. 14B, 37C) and increased percentages of indels in mammalian cells (FIG. 14C).

[0393] Next, the total amount of Cas9 present in the selection was limited by using a split-intein to divide ω-dCas9 into two halves and encoding only the C-terminal half (which contains the PID) on the SP. Production of large amounts of ω-dCas9 by the SP might lead to saturation of binding to protospacer-PAM sites AP despite the presence of a non-optimal PAM (FIG. 15A). Indeed, using higher concentrations of SpCas9 in in vitro PAM depletion assays can lead to depletion of non-canonical PAM sequences (REF). Here, residues 574-1368 of Cas9 fused to NpuC (dCas9c) reside on the phage, while ω-dCas9 (1-573) fused to NpuN (ω-dCas9_{N}) is provided on a complimentary plasmid (CP) (FIGS. 15B, 37A). This strategy allows the total amount of full-length SpCas9 produced in the host cells in PACE to be user-defined on the CP.

[0394] The consensus mutations obtained from the dual-AP selection were subcloned into a split-intein ω-dCas9 format. However, several mutations (T10A/I322V/S409I,E427G) had accumulated in the 1-573 region over the course of the previous selection. These mutations were incorporated into ω-dCas9_{N} and investigated their effect on Cas9 DNA binding in overnight phage propagation assays using an evolved dCas9c phage clone (P4.72.5). High phage propagation was observed on host cells containing a CP encoding ω-dCas9_{N}(T10A/I322V/S409I/E427G), suggesting that the mutations might have a beneficial effect on Cas9 binding. Therefore, these four mutations were incorporated into ω-dCas9_{N} for all future evolutions (hereon referred to as ω-dCas9_{N-mut}).

[0395] Thus, the evolved dCas9c was subjected to two subsequent evolutions using host cells encoding a medium-copy AP containing an AAA PAM and low-copy CPs providing ω-dCas9_{N-mut} from increasingly weak constitutive promoters. These rounds lead to the accumulation of additional mutations in the PID, including D1180G, which was present in several sequenced clones (FIGS. 16A, 37B). The Cas9s evolved through this split-intein method exhibited a large increase in mammalian cell base editing activity, with more than double the activity of our previous variants on most NAA sites tested (FIGS. 17, 37C). Additionally, the Cas9s evolved through this split-intein method exhibited a large increase in percentage of indels in most NAA PAMs tested (FIG. 18).

[0396] Finally, to further increase selection stringency, gVI, whose protein product pVI is essential for phage propagation, was removed from the phage genome for use as an orthogonal selection marker for phage propagation on a second AP (FIG. 27A). Both previously described selection principles were employed, requiring a split-intein ω-dCas9 to bind two distinct protospacers on APs providing both gIII and gVI (FIG. 37A). Thus, three dCas9c clones from pervious evolutions (P13.3.3, P10.5.192.7, P10.6.192.1) were subjected to this highest-stringency selection in PACE, resulting in additional mutations in the PID-notably R1114G and L1318S, which both converged to a high degree (FIG. 37B).

[0397] Unfortunately, these variants proved to be inactive in mammalian cell CBE experiments (FIG. 37C). The large numbers of mutations present in these highly evolved variants, especially those outside the PID, might prove deleterious to expression and/or nuclease activity. To address this, DNA shuffling was performed of the C-terminal portion (residues 574-1368) of the pool of variants from this final evolution with that of wild-type Cas9 and re-subjected the resulting library to the most stringent binding selection. This led to the isolation of several clones that exhibited improved CBE activity at both NAA and NGA sites in mammalian cells, most notably clone P16s.4-5 (R1114G/D1135N/V1139A/D1180G/E1219V/Q1221H/A1320V/R1333K) (FIG. 37B), which exhibited the highest levels of activity across all sites tested amongst the variants (FIG. 37C).

### Example 4

[0398] Evolution of Cas9 Variants that Recognize NAC or NAT PAM Sequences

[0399] The strategy evolved in Example III was employed in evolving toward NAT and NAC PAMs in SpCas9 and xCas9 proteins to minimize the accumulation of potentially deleterious bystander mutations. To ensure the variants retained nuclease activity, the dCas9 from the SP pool was evolved to bind either a TAT or CAC PAM in PANCE to a nuclease-active form and passed the resulting library through a modified version of a previously reported bacterial DNA cleavage selection (data not shown). Here, Cas9 variants are challenged for their ability to bind to and cleave a protospacer-PAM sequence on a high-copy plasmid that also encodes a conditionally toxic gene (sacB). The surviving cells should then encode Cas9 variants with mutations that confer binding to a specific PAM and are compatible with nuclease activity.

[0400] From these experiments, two clones were isolated that exhibited DNA cleavage activity on a selection plasmid containing a TAT PAM with PID consensus mutations of D1135N/E1219V/Q1221H/P1321S/R1335L, and one clone that cleaved a selection plasmid with a CAC PAM with PID mutations N1135D/E1219V/D1332N/R1335Q/T1337N (FIGS. 37D, 37E). These nuclease-active TAT and CAC variants were then converted into split-intein ω-dCas9 format and evolved in PACE using host cells encoding APs with either NAT (AAT or TAT) or NAC (AAC, TAC, or CAC) PAMs, respectively. These experiments resulted in the enrichment of several additional PID mutations, including R1114G, which arose independently in all three PAM trajectories (NAA, NAT, and NAC) (FIGS. 37D, 37E), suggesting that this mutation may be generally beneficial for modifying PAM recognition by the PID.

[0401] Next, gVI was removed from the genome of these evolved SP pools, which were subjected to additional selection in PACE using a dual-AP system containing two distinct protospacers and either an AAT or TAC PAM driving gIII/gVI expression. A Y1131C mutation was enriched in the SP pool evolved on AAT (FIG. 37E); however, variants carrying this mutation were inactive in mammalian cell BE experiments (Supplementary Figure XX). Because no additional functional mutations in the PID were observed, the most active NAT PAM-targeting variant was selected from the split-intein ω-dCas9 evolution (clone P12.3.b9-8) to move forward with. This variant contained the PID mutations R1114G/D1135N/D1180G/G1218S/E1219V/Q1221H/P1249S/E1253K/P1321S/D1332G/R1335L (FIG. 37E).

[0402] Several additional mutations were also enriched in the SP pool selected for binding to a TAC PAM in the split-intein ω-dCas9/dual protospacer PACE. The C-terminal portion (residues 574-1368) of this pool was shuffled with that of wild-type Cas9 and re-challenged the resulting library with our most stringent binding selection. From the surviving SP pool, clone P17s.1.7-4 with the PID mutations R1114G/D1135N/E1219V/D1332N/R1335Q/T1337N/S1338T/H1249R was isolated from the surviving pool (FIG. 37C).

### Example 5

### Mutations Outside of the PID

[0403] Structural studies of the SpCas9 suggest that residues in the PID mediate PAM specificity (REF). Indeed, most of the previous efforts to engineer or evolve SpCas9 to accept alternative PAMs have focused on modulating this region of the protein. However, because PANCE and PACE experiments involved mutagenesis of either the entire SpCas9 sequence or residues 574-1368 (in the case of split-intein ω-dCas9), there was an enrichment of a number of mutations outside of the PID. Because many of these mutations fell within the RuvC or HNH nuclease domains, some may negatively impact Cas9 nuclease activity. However, other mutations in the helical domain consistently enriched across several independent evolving populations, suggesting that they may confer a beneficial effect on Cas9 DNA binding/unwinding.

[0404] Therefore, to minimize the deleterious effects from bystander mutation accumulation in the nuclease domains but also to preserve beneficial mutations in the helical domain, the evolved PIDs from Example 4 were transferred onto a fixed N-terminal sequence that included the mutations T10A/I322V/S409I/E427G shown to improve phage propagation in the split-intein ω-dCas9 selection, as well as R654L/R753G, which consistently enriched across multiple independently evolving SP pools. The addition of these mutations to CBEs containing the PIDs of NAA variant P16.4-5 and NAC variant P17.1.7-4 improved CBE activity in mammalian cells across several sites when compared to just the PID mutations alone (data not shown). A smaller effect was observed for NAT variant P12.3.b9-8, but because there did not appear to be a decrease in overall CBE activity (data not shown), there N-terminal mutations were incorporated into all three final variants, from hereon referred to as NRRH, NRCH, and NRTH, which are derived from clones P16.4-5, P17.1.7-4, and P12.3.b9-8, respectively.

### Example 6

### Characterization of PAM Specificity Through Bacterial Depletion

[0405] To better characterize the PAM specificities of the evolved variants, bacterial PAM depletion was performed using a library consisting of 4Ns following the protospacer (FIGS. 19A-19C). For comparison, depletion experiments were also performed with wild-type Cas9 that acts on an NGG PAM sequence (SpCas9-NG) in parallel. Cells were plated after 1 or 3 h or overnight expression of the SpCas9 variant from an inducible promoter to better resolve any kinetic differences in PAM sequence preference. As expected, depletion scores of any given PAM increased with longer induction times (data not shown), with the shortest induction times resulting in the most noticeable sequence preferences (data not shown).

[0406] For example, at 1 hour (h) induction, NRRH exhibited a strong preference for C at the 4^{th} PAM position, a mixed preference for G/A at positions 2 and 3 and a moderate preference for G at position 1 (FIGS. 20, 38A). However, longer induction times resulted in more relaxed specificity at all positions. Similarly, NRCH showed a strong preference for G at position 2 and a moderate preference for pyrimidines at position 4 (FIG. 38A) at 1 h induction, but only a mixed enrichment for G/A at position 2 was observable at longer induction times (FIG. 38A). Finally, at 1 h induction, NRTH enriched strongly for G and T at positions 2 and 3, respectively (FIG. 38A), but by 3 h we observed a shift in the nucleotide preference at position 2 to a mix of G and A, suggesting that this variant recognizes and cleaves NAT PAMs more slowly when compared to NGT PAMs. Additionally, this suggests that NRTH may preferentially recognize NRT over NGG PAMs.

[0407] Interestingly, SpCas9-NG displayed a moderate preference for G at the 3^{rd} and 4^{th} PAM position at short induction times. This is consistent with SpCas9-NG's T1337R mutation, which is also found in SpCas9 VRER and VRQR [REF] and is the cause for the increased specificity for G at the 4th PAM position of these variants. Similar to the evolved Cas9 variants, SpCas9-NG's PAM sequence requirements also became more relaxed with longer induction times (data not shown).

[0408] Further, the P11 clone, which also possesses the P4.2.72.4 spCas9 mutations, was evolved using split-intein Cas9 mutants on AAA PAM bacterial depletion to generate clones with new mutations (FIG. 21). The ability of the newly P11-SacB-1 and P11-SacB-2 clones to perform base-editing and generate indels was evaluated in vitro in HEK293T cells (FIGS. 22-23). Both the P11-SacB-1 and P11-SacB-2 clones had higher base editing activity and a greater percentage of indels generated compared to xCas9 proteins (FIGS. 22-23).

[0409] Similarly, the P12 clone was evolved using split-intein Cas9 mutants on AAT or TAT PAM bacterial depletion to generate clones with new mutations (FIGS. 24A-24B). The ability of these newly-generated P12.3.b9-8 and P12.3.b1O clones to perform base-editing and generate indels was evaluated in vitro in HEK293T cells (FIGS. 25A, 25B, 26A, 26B).

### Example 7

### Survival-Based Selection for Isolating Nuclease-Active Cas9 Variants

[0410] A survival-based selection method for isolating nuclease-active SpCas9 clones was generated (FIG. 28). The SacB gene produces a toxic protein, and clones that survive this selection will have active nuclease that can cut the SacB gene. The original TAT clone was generated from PANCE on a TAT PAM, but lacked nuclease activity. This TAT cloned was subcloned from a pool of N4.TAT selection phage (SP) into a Cas9 plasmid and selection was performed for variants that cut a SacB selection plasmid with a TAT PAM. Two additional TAT clones, SacB-TAT-1 and SacB-TAT-2, were isolated (FIGS. 29A, 29B).

[0411] These SacB-TAT-1 and SacB-TAT-2 clones were evaluated for their ability to perform base editing and generating indels in vitro in HEK293T cells (FIGS. 30A, 30B, 31). The SacB-TAT-1 and SacB-TAT-2 clones both possessed higher base editing activity on GAT, CAT, and GAAP AMs compared with xCas9 (FIG. 30A), as well as higher indel generation on GAT and TAT PAMs compared with xCas9 and spCas9 (FIGS. 30B, 31).

### Example 8

### Evolved Cas9 to Generate Indels at Endogenous Human Genomic Loci

[0412] The activity of the evolved SpCas9 and xCas9 variant proteins was assessed in HEK293T cells through indel formation at endogenous target sites spanning all 64 NANN PAMs. For comparison, the activity of the SpCas9 wild-type (SpCas9-NG) protein was tested at these sites in parallel. Generally, each of the variants displayed the highest indel formation activity on target sites containing a PAM it was evolved to recognize, with NRRH and NRTH showing an average of 23.0±7.8% and 22.9±7.2% indel formation on target sites containing NAAN and NATN PAMs, respectively. Sites containing NACN PAMs were edited at slightly lower efficiencies, with NRCH averaging 18.0±5.9% indel formation. Additionally, NRRH displayed 20% average indel formation on sites containing a NAG PAM, even though it had not been evolved to bind this PAM sequence (FIG. 38B).

[0413] Interestingly, indel formation was observed with SpCas9-NG at a number of NANN sites. Although its average indel formation across these sites was lower than the evolved variants, SpCas9-NG displayed activity at sites with NANG PAMs (12.2±3.0%, 11.9±5.2%, 21.2±6.2%, and 18.3±4.4% average indel formation for NAAG, NACG, NATG, and NAGG, respectively) (FIG. 38B). In contrast, the evolved variants showed the lowest average activity at sites with PAM sequences with a G at position 4, and the highest at sites with a non-G (H) at this position (27.3±8.6%, 23.7±6.8, 26.9±8.1%, and 26.8±7.6% average indel formation for NRRH, NRCH, NRTH, and NRRH on NAAH, NACH, NATH, and NAGH PAMs, respectively) (FIGS. 38B, 38C).

[0414] These results are consistent with the sequence preferences predicted by the bacterial PAM depletion experiments, and suggest that the variants and SpCas9-NG exhibit orthogonal PAM specificities.

[0415] The indel formation activity of evolved variants and SpCas9-NG were tested on a number of endogenous target sites containing NGN PAMs, with SpCas9-NG, NRCH, and NRTH performing best on NGA, NGC, and NGT PAMs, respectively, with 41.1±10.7%, 42.4±4.4%, and 67.7±6.8% average indel formation (data not shown). Similar to above, a preference for H at position 4 of the PAM by our variants was observed in these experiments.

[0416] Thus, increasing the DNA targeting capabilities of SpCas9 and xCas9 variants towards NRN PAMs could also greatly increase the proportion of genomic off-target sequences accessible by these Cas9 variants.

### Example 9

[0417] Evolved Cas9s are Compatible with Base Editing Technology

[0418] Next, the ability of evolved Cas9 variant proteins to support base editing was determined. C to T base editors (CBEs) were generated by incorporating the evolved Cas9 variants into BE4max (REF) in place of wt-Cas9. The activity of these CBEs was analyzed at the same 64 endogenous examined above for indel formation. As before, each of the three variants showed the highest average activity on sites containing the PAM it was evolved to recognize. BE4max-NRRH and BE4max-NRTH performed best on NAAN and NATN PAMs, with an average of 11.7±3.7% and 17.3±4.0% C⋅G to T⋅A conversion, respectively. CBE activity on NACN PAMs was slightly less efficient, with BE4max-NRCH enabling the highest editing activity at these sites at an average of 10.8±3.0% base conversion. Both BE4max-NRRH and BE4max-NG edit NAGN sites similarly, at 11.4±3.6 and 11.6±4.8% average base conversion (FIG. 39A).

[0419] Improved base editing activity was again observed on sites with NANH PAMS, where C⋅G to T⋅A conversion at NAAH, NACH, NATH, and NAGH sites increasing to 14.4±4.1%, 13.0±2.6%, 21.0±4.2%, and 14.5±4.0 for BE4max-NRRH, -NRCH, -NRTH, and —NRRH, respectively (FIGS. 39A, 39B). BE4max-NG performs well at sites containing NANG PAMs, with 13.6±4.4% average editing (FIG. 39A). These editors also function on sites with NGN PAMs (data not shown). As expected, the CBE activity across all 64 sites is much more variable than that of indel formation, since there are increased requirements for efficient base editing such as sequence context and position of the C within the window. Finally, the Cas9 variants are also compatible with A to T base editors, exhibiting similar performance on a subset of sites containing NAN and NGN PAMs when substituted in place of wt-Cas9 in ABEmax (FIG. 39C).

### Example 10

### Characterization of Evolved Cas9s and SpCas9-NG Using a Mammalian Library for Base Editing Activity

[0420] Finally, to thoroughly profile the PAM preferences of these variants, the base editing efficiencies of the three evolved variants, SpCas9-NG, and wt-Cas9 were evaluated on a library of 11,776 unique sequences in mammalian cells. This library was designed using 46 distinct protospacers derived from sequences found in the human genome, each with different sequence contexts surrounding a fixed C in the 4th position. Each protospacer is adjacent to a PAM sequence of 4Ns, and is additionally flanked with designated primer binding sites for amplification for high-throughput sequencing (HTS) analysis (FIG. 40B).

[0421] Characterization of the evolved variants in this library format recapitulated the same preferences observed with both bacterial PAM depletion and base editing on endogenous mammalian genomic sites. For instance, our evolved variants exhibited the highest editing activity on the third base towards which it was evolved (FIG. 40E) or when a non-G was at the 4th position of the PAM, performing best when a pyrimidine was at this position (FIG. 40F). Additionally, our evolved variants, in particular NRRH, performed best when a G or C was present at position 1 of the PAM, whereas wt-Cas9 exhibited only slight preference for G at this position (data not shown).

[0422] The U6 promoter, commonly used to express sgRNAs in mammalian cells, initiates transcription with a 5′ G. If a G is not natively present at the 5′ end of the protospacer, guide sequences are typically either extended to the next native G or transcribed with a mismatched G at position 21 of the guide sequence. However, high-fidelity (HF) Cas9s, which are less tolerant of mismatches between the protospacer and sgRNA, exhibit decreased efficiency when using a 21 nucleotide (nt) with a mismatched 5′ G [REF]. Because PACE has previously led to Cas9s with HF properties, including sgRNA mismatch intolerance [REF], we sought to determine if our new variants shared the same characteristics.

[0423] The average base editing activity of the evolved variants was evaluated across all sites containing either a 20 nt protospacer with a matched 5′ G, a 21 nt protospacer with a matched 5′ G, or a 21 nt protospacer with a mismatched 5′G. Both the evolved variants and wt-Cas9 showed the highest base editing activity with a 20 nt protospacer and a matched 5′ G. When examining all NNNN PAMs, both the variants and wt-Cas9 showed a significant decrease in base editing efficiency when the protospacer was increased to 21 nt, regardless if the 5′ G was matched with the target sequence (FIG. 40C). The magnitude of this decrease was greater for the evolved variants when compared to wt-Cas9. Interestingly, the deleterious effect of using a 21 nt protospacer on editing efficiency is ameliorated when targeting sites with a NGNN PAM (data not shown), and almost completely absent when targeting sites with a NGGN PAM (FIG. 40D). This is especially true for wt-Cas9, which shows no significantly decreased base editing activity on sites with a 21 nt protospacer when the PAM is NGG.

### Example 11

### Evolved Cas9s Correct Disease-Associated SNPs by Accessing Non-G PAMs

[0424] To demonstrate the utility of the evolved variants in a disease-relevant context, the Glu to Val point mutation at position 6 of the sickle-hemoglobin (HbS) variant of β-globin, which is causative of red blood cell sickling in sickle-cell anemia, was targeted [REF]. The HbS mutation arises from a GAG to GTG codon change, which cannot be fully reverted through current base editing technologies. However, this SNP can be partially corrected with ABE to a GCG (Ala) through A⋅T to G·C conversion on the opposite strand. This genotype, known as the Makassar mutation, has been shown to result in phenotypically normal hemoglobin.

[0425] Unfortunately, the only NGG or NGN PAMs available at this site place the target A at either position 2 or 9, respectively, which fall outside the optimal editing window for ABE. However, two alternative target protospacer sequences that fall adjacent to a CAT or CAC PAM place the target A at either position 4 or 7, respectively, with an off-target A present at either position 6 or 9 leading to a silent CCT to CCC (Pro to Pro) mutation. Thus, the ability of the evolved variants, along with SpCas9-NG, to convert the sickle-cell SNP to the Makassar mutation using these alternative sites with non-G PAMs was evaluated.

[0426] In experiments using HEK293T cells engineered with a GAG to GTG mutation at codon 6 of β-globin, while the evolved variants supported considerable A to G conversion at both sites, SpCas9-NG edited efficiently only using the protospacer sequence containing a CAT PAM. This is perhaps due to the presence of a G at the 4th position of this PAM sequence (FIGS. 41B, 41C), which appears to improve SpCas9-NG's recognition of NAN PAMs (see above). Unfortunately, editing using the CAT PAM protospacer occurred primarily at the off-target base (position 6), with the target A (position 4) showing less than 10% conversion across all editors (FIG. 41C). Base conversion using the CAC PAM protospacer, however, was much more efficient. As expected, ABEmax-NRCH showed the highest editing activity, with 40.6±6.5% base conversion at the target A (position 7) and 13.0±5.6% at the off-target A (position 9).

[0427] ABEmax-NRRH and -NRTH were also able to achieve 28.9±7.4% and 14.1±4.8% conversion, respectively. The high activity of all three evolved variants at this site likely stems from the presence of a C at the 4th position of the CAC PAM sequence. In comparison, ABEmax-NG showed negligible (1.0±0.8%) base conversion activity at this site (FIG. 41B). Collectively, these results suggest that both the evolved variants and SpCas9-NG have the potential to edit disease relevant SNPs using non-G PAMs, and furthermore highlight the utility of targeting a SNP using multiple protospacer/PAM sequences.

[0428] Together with SpCas9-NG, the evolved variants NRRH, NRCH, and NRTH should expand the targeting scope of SpCas9 to sites with NR PAMs, increasing the number of pathogenic SNPs correctable by either CBE or ABE. Based on analysis of the ClinVar database, 95.0% of pathogenic SNPs correctable through a C⋅G to T⋅A conversion and 94.7% of pathogenic SNPs correctable through an A⋅T to G⋅C conversion can be targeting using an NR PAM. Additionally, expansion to NR PAMs increases the number of possible protospacers available for targeting a given SNP for correction with base editors: on average, there are XX protospacers per disease SNP targetable with CBE and XX protospacers for those targetable with ABE with NR PAMs, compared to XX targetable with CBE and XX targetable with ABE, respectively, when using NG PAMs.

### Example 12

[0429] Characterizing Mutants that Work on NRRH, NRCH, and NRTH PAMs

[0430] SpCas9 mutant proteins were identified that work best on NRRH, NRCH, and NRTH PAMs. The SpCas9 mutant protein that works best on NARH (“es” variant), has an amino acid sequence as presented in SEQ ID NO: 22 (underligned residues are mutated from SpCas9)

(SEQ ID NO: 22)
MDKKYSIGLDIGTNSVGWAVITDEYKVPSKKFKVLGNTDRHSIKKNLIGAL
LFDSGETAEATRLKRTARRRYTRRKNRICYLQEIFSNEMAKVDDSFFHRLE
ESFLVEEDKKHERHPIFGNIVDEVAYHEKYPTIYHLRKKLVDSTDKADLRL
IYLALAHMIKFRGHFLIEGDLNPDNSDVDKLFIQLVQTYNQLFEENPINAS
GVDAKAILSARLSKSRRLENLIAQLPGEKKNGLFGNLIALSLGLTPNFKSN
FDLAEDAKLQLSKDTYDDDLDNLLAQIGDQYADLFLAAKNLSDAILLSDIL
RVNTEITKAPLSASMVKRYDEHHQDLTLLKALVRQQLPEKYKEIFFDQSKN
GYAGYIDGGASQEEFYKFIKPILEKMDGTEELLVKLNREDLLRKQRTFDNG
IIPHQIHLGELHAILRRQGDFYPFLKDNREKIEKILTFRIPYYVGPLARGN
SRFAWMTRKSEETITPWNFEEVVDKGASAQSFIERMTNFDKNLPNEKVLPK
HSLLYEYFTVYNELTKVKYVTEGMRKPAFLSGEQKKAIVDLLFKTNRKVTV
KQLKEDYFKKIECFDSVEISGVEDRFNASLGTYHDLLKIIKDKDFLDNEEN
EDILEDIVLTLTLFEDREMIEERLKTYAHLFDDKVMKQLKRLRYTGWGRLS
RKLINGIRDKQSGKTILDFLKSDGFANRNFMQLIHDDSLTFKEDIQKAQVS
GQGDSLHEHIANLAGSPAIKKGILQTVKVVDELVKVMGGHKPENIVIEMAR
ENQTTQKGQKNSRERMKRIEEGIKELGSQILKEHPVENTQLQNEKLYLYYL
QNGRDMYVDQELDINRLSDYDVDHIVPQSFLKDDSIDNKVLTRSDKNRGKS
DNVPSEEVVKKMKNYWRQLLNAKLITQRKFDNLTKAERGGLSELDKAGFIK
RQLVETRQITKHVAQILDSRMNTKYDENDKLIREVKVITLKSKLVSDFRKD
FQFYKVREINNYHHAHDAYLNAVVGTALIKKYPKLESEFVYGDYKVYDVRK
MIAKSEQEIGKATAKYFFYSNIMNFFKTEITLANGEIRKRPLIETNGETGE
IVWDKGRDFATVRKVLSMPQVNIVKKTEVQTGGFSKESILPKGNSDKLIAR
KKDWDPKKYGGFNSPTAAYSVLVVAKVEKGKSKKLKSVKELLGITIMERSS
FEKNPIGFLEAKGYKEVKKDLIIKLPKYSLFELENGRKRMLASAGVLHKGN
ELALPSKYVNFLYLASHYEKLKGSPEDNEQKQLFVEQHKHYLDEIIEQISE
FSKRVILADANLDKVLSAYNKHRDKPIREQAENIIHLFTLTNLGVPAAFKY
FDTTIDKKRYTSTKEVLDATLIHQSITGLYETRIDLSQLGGD.

[0431] The SpCas9 mutant protein that works best on NRCH (“fn” variant), has an amino acid sequence as presented in SEQ ID NO: 23 (underligned residues are mutated from SpCas9)

(SEQ ID NO: 23)
MDKKYSIGLDIGTNSVGWAVITDEYKVPSKKFKVLGNTDRHSIKKNLIGAL
LFDSGETAEATRLKRTARRRYTRRKNRICYLQEIFSNEMAKVDDSFFHRLE
ESFLVEEDKKHERHPIFGNIVDEVAYHEKYPTIYHLRKKLVDSTDKADLRL
IYLALAHMIKFRGHFLIEGDLNPDNSDVDKLFIQLVQTYNQLFEENPINAS
GVDAKAILSARLSKSRRLENLIAQLPGEKKNGLFGNLIALSLGLTPNFKSN
FDLAEDAKLQLSKDTYDDDLDNLLAQIGDQYADLFLAAKNLSDAILLSDIL
RVNTEITKAPLSASMVKRYDEHHQDLTLLKALVRQQLPEKYKEIFFDQSKN
GYAGYIDGGASQEEFYKFIKPILEKMDGTEELLVKLNREDLLRKQRTFDNG
IIPHQIHLGELHAILRRQGDFYPFLKDNREKIEKILTFRIPYYVGPLARGN
SRFAWMTRKSEETITPWNFEEVVDKGASAQSFIERMTNFDKNLPNEKVLPK
HSLLYEYFTVYNELTKVKYVTEGMRKPAFLSGEQKKAIVDLLFKTNRKVTV
KQLKEDYFKKIECFDSVEISGVEDRFNASLGTYHDLLKIIKDKDFLDNEEN
EDILEDIVLTLTLFEDREMIEERLKTYAHLFDDKVMKQLKRLRYTGWGRLS
RKLINGIRDKQSGKTILDFLKSDGFANRNFMQLIHDDSLTFKEDIQKAQVS
GQGDSLHEHIANLAGSPAIKKGILQTVKVVDELVKVMGGHKPENIVIEMAR
ENQTTQKGQKNSRERMKRIEEGIKELGSQILKEHPVENTQLQNEKLYLYYL
QNGRDMYVDQELDINRLSDYDVDHIVPQSFLKDDSIDNKVLTRSDKNRGKS
DNVPSEEVVKKMKNYWRQLLNAKLITQRKFDNLIKAERGGLSELDKAGFIK
RQLVETRQIIKHVAQILDSRMNIKYDENDKLIREVKVITLKSKLVSDFRKD
FQFYKVREINNYHHAHDAYLNAVVGIALIKKYPKLESEFVYGDYKVYDVRK
MIAKSEQEIGKATAKYFFYSNIMNFFKTEITLANGEIRKRPLIETNGETGE
IVWDKGRDFATVRKVLSMPQVNIVKKTEVQTGGFSKESILPKGNSDKLIAR
KKDWDPKKYGGFNSPIVAYSVLVVAKVEKGKSKKLKSVKELLGITIMERSS
FEKNPIDFLEAKGYKEVKKDLIIKLPKYSLFELENGRKRMLASAGVLQKGN
ELALPSKYVNFLYLASHYEKLKGSPEDNEQKQLFVEQHKHYLDEIIEQISE
FSKRVILADANLDKVLSAYNKHRDKPIREQAENIIHLFTLINLGAPAAFKY
FDTTINRKQYNTIKEVLDATLIRQSITGLYETRIDLSQLGGD

[0432] The SpCas9 mutant protein that works best on NRTH (“ax” variant), has an amino acid sequence as presented in SEQ ID NO: 24 (underligned residues are mutated from SpCas9)

(SEQ ID NO: 24)
MDKKYSIGLDIGTNSVGWAVITDEYKVPSKKFKVLGNTDRHSIKKNLIGAL
LFDSGETAEATRLKRTARRRYTRRKNRICYLQEIFSNEMAKVDDSFFHRLE
ESFLVEEDKKHERHPIFGNIVDEVAYHEKYPTIYHLRKKLVDSTDKADLRL
IYLALAHMIKFRGHFLIEGDLNPDNSDVDKLFIQLVQTYNQLFEENPINAS
GVDAKAILSARLSKSRRLENLIAQLPGEKKNGLFGNLIALSLGLTPNFKSN
FDLAEDAKLQLSKDTYDDDLDNLLAQIGDQYADLFLAAKNLSDAILLSDIL
RVNTEITKAPLSASMVKRYDEHHQDLTLLKALVRQQLPEKYKEIFFDQSKN
GYAGYIDGGASQEEFYKFIKPILEKMDGTEELLVKLNREDLLRKQRTFDNG
IIPHQIHLGELHAILRRQGDFYPFLKDNREKIEKILTFRIPYYVGPLARGN
SRFAWMTRKSEETITPWNFEEVVDKGASAQSFIERMTNFDKNLPNEKVLPK
HSLLYEYFTVYNELTKVKYVTEGMRKPAFLSGEQKKAIVDLLFKTNRKVTV
KQLKEDYFKKIECFDSVEISGVEDRFNASLGTYHDLLKIIKDKDFLDNEEN
EDILEDIVLTLTLFEDREMIEERLKTYAHLFDDKVMKQLKRLRYTGWGRLS
RKLINGIRDKQSGKTILDFLKSDGFANRNFMQLIHDDSLTFKEDIQKAQVS
GQGDSLHEHIANLAGSPAIKKGILQTVKVVDELVKVMGGHKPENIVIEMAR
ENQTTQKGQKNSRERMKRIEEGIKELGSQILKEHPVENTQLQNEKLYLYYL
QNGRDMYVDQELDINRLSDYDVDHIVPQSFLKDDSIDNKVLTRSDKNRGKS
DNVPSEEVVKKMKNYWRQLLNAKLITQRKFDNLTKAERGGLSELDKAGFIK
RQLVETRQITKHVAQILDSRMNTKYDENDKLIREVKVITLKSKLVSDFRKD
FQFYKVREINNYHHAHDAYLNAVVGTALIKKYPKLESEFVYGDYKVYDVRK
MIAKSEQEIGKATAKYFFYSNIMNFFKTEITLANGEIRKRPLIETNGETGE
IVWDKGRDFATVRKVLSMPQVNIVKKTEVQTGGFSKESILPKGNSDKLIAR
KKDWDPKKYGGFNSPTVAYSVLVVAKVEKGKSKKLKSVKELLGITIMERSS
FEKNPIGFLEAKGYKEVKKDLIIKLPKYSLFELENGRKRMLASASVLHKGN
ELALPSKYVNFLYLASHYEKLKGSSEDNKQKQLFVEQHKHYLDEIIEQISE
FSKRVILADANLDKVLSAYNKHRDKPIREQAENIIHLFTLTNLGASAAFKY
FDTTIGRKLYTSTKEVLDATLIHQSITGLYETRIDLSQLGGD

[0433] The base-editing activity of the ax, es, fn, and SpCas9 (“NG”) proteins was characterized in vitro in HEK293T cells on NAA, NAC, NAT, and NAG PAMs (FIGS. 33A-33D; 34A-34B). The es protein had increased activity on CAAA, CAAC, AAAT, and GAAC PAMs, the fn protein had increased activity on AACC, AACT, TACT, TACC, CACT, and CACC PAMs, the ax protein had increased activity on AATA, TATT, TATA, TATC, CATA, CATT, CATC, GATA, GATT, and GATC PAMS compared with other SpCas9 proteins (FIGS. 33A-33C; 34A-34B).

[0434] The A to G base editing activity of es and fn SpCas9 proteins were also characterized in vitro in HEK293T cells on NAA, NGA, NAC, and NGC PAMs (FIGS. 35A-35C).

[0435] The es, fn, or wild-type SpCas9 proteins were incorporated into the ABEMAX A to G gene editing fusion protein. The es protein had increased base-editing activity on AAAT, CAAC, GAAC, AACC, TACT, TACC, CACT, CACC, AGCC, AAGA, and AAGC PAMs compared with NG SpCas9 protein (FIGS. 35A, 35B). The fn protein had increased base-editing activity on GGGT and TGGC compared with NG SpCas9 protein (FIG. 35C).

### Example 13

[0436] Continuous Evolution of SpCas9 Variants Compatible with Non-G PAMs

[0437] Streptococcus pyogenes Cas9 (SpCas9) is a widely used genome editing tool, but can only access a small fraction of DNA sites due to its requirement for an NGG protospaceradjacent motf (PAM). This limits SpCas9's utility for precision genome editing applications such as base editing (Rees and Liu, 2018), homology-directed repair (Paquet et al., 2016), and predictable template-free end-joining repair (Shen et al., 2018). While SpCas9 variants with alternative PAM requirements have been reported, their targeting scope remains primarily restricted to PAMs containing G. Here, we report the laboratory evolution of three new SpCas9 variants collectively capable of recognizing NRNH PAMs (where R=A or G and H=A, C, or T) using an improved phage-assisted continuous evolution (PACE) selection for DNA binding. We show that these variants recognize NAAH, NACH, NATH, and NAGH PAMs to effect indel formation, cytosine base editing, and adenine base editing using a panel of 64 endogenous human genome target sites containing all NANN PAMs. Additionally, we profile the editing efficiencies of our evolved SpCas9s and the previously-reported SpCas9-NG as base editors on a 11,776-member genomically integrated protospacer/sgRNA pair library spanning all NNNN PAMs in HEK293T cells to provide an exhaustive characterization of their PAM preferences in a human cell setting. Finally, we demonstrate the ability of our variants to enable A⋅T-to-G⋅C base editing of the founder sickle-cell anemia mutation of β-globin using a previously inaccessible CAC PAM. Together with previously reported SpCas9 mutants, these newly evolved variants expand the targeting scope of SpCas9 to include a majority of NR PAM sequences, greatly increasing the fraction of genomes accessible to Cas9-mediated genome editing.

[0438] The CRISPR-Cas9 system, originally evolved as a mechanism for adaptive immunity in bacteria, has in recent years transformed the life sciences by enabling a wide range of techniques for targeted genome manipulation including gene disruption, homologydirected repair, gene regulation, and base editing (Komor et al., 2017). The applicability of these techniques is limited by the requirement of Cas9 for a protospacer-adjacent motif (PAM) in order to bind a DNA sequence. For example, wild-type Streptococcus pyogenes Cas9 (SpCas9), the most widely-used and well-characterized Cas9 homolog (Komor et al., 2017), recognizes an NGG PAM immediately 3′ of the target DNA sequence, and with rare exception will not efficiently engage DNA sequences lacking an NGG PAM (Jinek et al., 2012). To address this limitation and expand the range of targetable genomic loci, researchers have used naturally occurring Cas9 orthologs with different PAM specificities (Cebrian-Serrano and Davies, 2017). The majority of these natural Cas9 variants, however, are less well-characterized, less active in a variety of conditions, and/or more stringent in their PAM requirements than SpCas9.

[0439] Motivated by the limited set of natural Cas9 homologs that have successfully been used for genome editing, researchers have engineered or evolved both Staphylococcus aureus Cas9 (SaCas9) (Kleinstiver et al., 2015a) and SpCas9 (Hu et al., 2018; Kleinstiver et al., 2015b; Nishimasu et al., 2018) to increase their PAM targeting scope. These efforts have led to an expansion of SpCas9's potential PAM compatibility from NGG to most NG sites (Hu et al., 2018; Nishimasu et al., 2018). However, despite this substantial increase in SpCas9's DNA targeting capability, non G-rich locations in the genome remain difficult to access, despite their abundance. The restriction on Cas9 targeting is especially problematic when using precision genome editing techniques which require strict placement of the Cas9 in relation to the desired genomic edit, such as homology-directed repair (HDR) (Paquet et al., 2016), predictable template-free end-joining (Shen et al., 2018), and base editing (Rees and Liu, 2018).

[0440] Base editing is a widely used genome editing technology in which a target base is directly converted to another base through deamination of cytosine to uracil (cytosine base editor, CBE) (Komor et al., 2016), or adenine to inosine (adenine base editor, ABE) (Gaudelli et al., 2017) by a Cas9-directed deaminase, ultimately resulting in a C⋅G-to-T⋅A, or A⋅T-to-G⋅C conversion, respectively. This technology is particularly sensitive to Cas9 positioning: activity for SpCas9-derived editors, for example, is optimal when the PAM is located approximately 13-17 nt away from the target base (Rees and Liu, 2018). In addition, for any given base edit, it may be desirable to screen multiple target sequence windows to maximize on-target activity while minimizing editing of other bases (Jin et al., 2019; Lee et al., 2018a; Xin et al., 2019; Zuo et al., 2019). Taken together, these requirements highlight the major ongoing need to access additional PAM sequences. Here we report the directed evolution of three new SpCas9 variants capable of recognizing NRRH, NRTH, and NRCH PAMs, respectively, where R=A or G, and H=A, C, or T. These variants were evolved through improved phage-assisted continuous evolution (PACE) selections for SpCas9 binding to specific sequences with non-NGG PAMs. We extensively characterized these three new variants, as well as SpCas9-NG (Nishimasu et al., 2018), a previously-reported engineered SpCas9 that recognizes NG PAMs, on 64 endogenous human genomic target sites, as well as a library of 11,776 integrated target sites. The new variants reported here, together with previously reported NG-compatible Cas9 variants, expand the potentially accessible PAM sequence space of SpCas9 to cover the vast majority of NR sequences.

### Results

### Initial Evolution of SnCas9 Toward Non-G PAM Sequences

[0441] Phage-assisted continuous evolution (PACE), a method for the rapid directed evolution of biomolecules, has been used to evolve a wide range of proteins including RNA polymerases (Carlson et al., 2014; Dickinson et al., 2013; Esvelt et al., 2011; Pu et al., 2017), proteases (Dickinson et al., 2014; Packer et al., 2017), antibody-like proteins (Badran et al., 2016; Wang et al., 2018), insecticidal proteins (Badran et al., 2016), metabolic enzymes (Roth et al., 2019), aminoacyl-tRNA synthetases (Bryson et al., 2017), and DNA-binding proteins (Hu et al., 2018; Hubbard et al., 2015). In PACE, a population of bacteriophage (selection phage, SP) is continuously diluted by E. coli host cells (Esvelt et al., 2011). These SP lack gene III (gIII), which encodes the coat protein pIII that is essential for phage infectivity, and instead express the protein to be evolved.

[0442] SP carrying protein variants with desired activity are able to trigger the production of pIII from an accessory plasmid (AP) in the host cells, thus generating infectious progeny and allowing the SP population to persist despite continuous dilution. Conversely, SP encoding inactive variants cannot trigger pIII production, and produce non-infectious progeny that are rapidly diluted out of the system. The SP genome is continuously mutagenized by a mutagenesis plasmid (MP), thus generating diversity in the evolving protein of interest.

[0443] PACE was used to evolve SpCas9 variants with broadened PAM compatibility by linking PAM recognition to SP propagation through a bacterial one-hybrid protein:DNA binding selection (Hu et al., 2018). In this selection system, binding of a nuclease-inactive dSpCas9 variant fused to the E. coli RNA polymerase omega subunit (\acute{ω}-dSpCas9) to a target protospacer-PAM sequence recruits E. coli RNA polymerase to drive gIII transcription from an adjacent s70 promoter (FIG. 36 (A)). Only SP carrying w-dSpCas9 variants capable of binding to the target PAM sequence will produce infectious progeny phage and replicate during PACE (Hu et al., 2018). Evolving SpCas9 against a mixture of all possible NNN or HHH (H=non-G) PAMs using this selection led to xCas9, which can bind some NG PAMs, but very few non-G PAMs (Hu et al., 2018). We hypothesized that during the evolution of xCas9, the use of a complex mixture of many PAMs reduced the selection pressure for binding activity on any specific PAM. Therefore, we reasoned that selecting for binding to specific PAM sequences in parallel PACE experiments might result in SpCas9 variants with better recognition of non-canonical PAMs.

[0444] To determine which non-G PAMs might be accessible upon extensive SpCas9 evolution, we performed phage propagation assays, which serve as a proxy for a protein's activity on a defined target, of SP encoding either SpCas9 or xCas9 on host cells containing APs spanning all 64 NNN PAM sequences (FIG. 36(B)). While SpCas9 and xCas9 demonstrated phage propagation activity on many G-containing PAMs, SP encoding xCas9 and, to a more limited extent, SpCas9, also showed modest propagation on host cells containing NAN PAM APs (FIG. 36(B)). Thus, we decided to focus our evolution efforts on the NAN subset of PAM sequence space.

[0445] We began by using phage-assisted non-continuous evolution (PANCE) (Roth et al., 2019; Suzuki et al., 2017), in which SP are iteratively passaged through serial dilution in plate wells containing host cells, to evolve either SpCas9 or xCas9 for binding to each of the 16 possible NAN PAM target sequences in parallel (FIG. 36(C)). While slower than PACE, PANCE is less stringent, enabling weakly active variants to replicate (Roth et al., 2019) and can be performed in higher throughput, allowing us to evolve simultaneously towards many different targets. After performing 19 rounds of serial dilution in PANCE (total net phage replication of ˜1038-fold) on each of the 16 NAN PAM variants in parallel, we observed mutations largely differing according to the 3rd base of the NAN PAM targeted for evolution (FIG. 36(D)). For example, variants selected on NAA enriched Gly, Ile, or Lys at position 1333, while those selected on NAT enriched Gln or Leu at position 1335.

[0446] Finally, variants evolved to bind NAC simultaneously acquired Gln at position 1335 and Asn at position 1337. Given this early divergence, we decided to divide the evolution of these SpCas9 variants into three separate non-G PAM trajectories: HAA, HAT, and HAC. Because our goal was to evolve SpCas9 to recognize non-G PAMs, we chose to exclude NAG from our targets; additionally, NG-targeting SpCas9 variants have been reported (Hu et al., 2018; Nishimasu et al., 2018), which in theory should allow targeting of sites with NAG PAMs by simply shifting the protospacer sequence by a single nt in the 3′ direction.

### New Cas9 PACE Selections Enable Evolution of NAA PAM Binding Activity

[0447] The NAA PAM trajectory was initially focused on. Despite enriching for multiple consensus mutations in the PAM-interacting domain (PID; residues 1099-1368) (D1135N, E1219V, Q1221H, H1264Y, A1320V, R1333K), our NAA-targeted PANCE evolved variants exhibited low base editing activity when subcloned into C to T base editors (CBEs) and tested on sites containing NAA PAMs in mammalian cells (clone GAA.N1-4; FIG. 37C). We hypothesized that evolving increased binding activity might benefit editing efficiencies, and implemented three strategies to increase selection stringency.

[0448] First, we required that the evolving SpCas9 also bind a second, distinct protospacer by using a dual-AP system. In this system, each AP provides one half of split-intein pIII (Wang et al., 2018) under control of the Cas9 1-hybrid circuit. Binding of the SpCas9 variant to both sites produces both pIII-intein halves, which must be coexpressed to splice and generate functional full-length pIII (FIG. 37A). We chose two variants evolved in PANCE (GAA.N1-2 and GAA.N1-4; FIGS. 37D and 37B) and subjected them to PACE using this dual-AP system. These experiments, which also targeted a CAA PAM, lead to the acquisition of five additional consensus mutations (A10T, I322V, S409I, E427G and G715C; FIG. 44B), which together in clone CAA.P1-1 improved CBE activity on sites with NAA PAMs in mammalian cells 4.2-fold on average when compared to PANCE evolved variant GAA.N1-4 (FIG. 37C).

[0449] Second, we reasoned that production of large amounts of w-dSpCas9 by the SP might saturate binding to protospacer-PAM sites even if the affinity of the SpCas9 variant for that PAM was modest. Indeed, previous reports have shown that using higher concentrations of SpCas9 can lead to recognition of non-canonical PAM sequences (Karvelis et al., 2015), despite modest binding of these sequences by SpCas9. Unfortunately, as both the promoter and ribosome-binding site for w-dSpCas9 are encoded on the SP, the total amount of w-dSpCas9 produced is subject to selection in PACE and thus falls outside of experimenter control.

[0450] Therefore, we sought to limit the total amount of SpCas9 present in the selection by using a split-intein to divide w-dSpCas9. Here, only the C-terminal segment of dSpCas9 (residues 574-1368) fused to NpuC (dSpCas9C) is encoded on the evolving SP, and the w-N-terminal portion (residues 1-573) fused to NpuN (w-dSpCas9N) is provided on an immutable complementary plasmid (CP) in the host cells (FIGS. 37A and 43B). This strategy (hereafter, “split-SpCas9”) allows the total amount of full-length SpCas9 produced in the host cells in PACE to be limited by the expression level of w-dSpCas9N from the CP.

[0451] We subcloned the mutations obtained from clone CAA.P1-1 (FIG. 37B), evolved using the dual-AP selection, into the split-SpCas9 format. Four mutations (T10A, 1322V, S409I, and E427G) had accumulated in residues 1-573 of this clone. To investigate their effect, we compared the activity of w-dSpCas9N with that of w-dSpCas9N(T10A I322V S409I E427G) (hereafter referred to as w-dSpCas9N-mut) in overnight phage propagation assays using phage encoding dSpCas9C derived from CAA.P1-1. We observed greater phage propagation on host cells with a CP encoding w-dSpCas9N-mut (FIG. 43D), suggesting that these four mutations might have a beneficial effect on SpCas9 binding. Therefore, we used w-dSpCas9N-mut in the CP supporting all subsequent evolution efforts.

[0452] We subjected our evolved CAA.P1-1 dSpCas9C to two subsequent PACE campaigns (8 and 3 days, respectively, at average flow rates of 1.3 V/h) using host cells harboring an AP containing an AAA or CAA PAM target site and CPs providing successively decreasing amounts of w-dSpCas9N-mut (see Methods for details). These rounds lead to the accumulation of additional mutations in the PID, including D1180G, which was present in several sequenced clones (CAA.P2-2, AAA.P3-1, CAA.P3-1,2; FIG. 37B).

[0453] Among 10 surviving clones randomly chosen for sequencing, we observed 7-17 nonsilent mutations per clone (FIG. 37B). From these, the SpCas9 variant CAA.P2-2 exhibited a large increase in mammalian cell base editing activity, with more than double the activity of our previous variants on most NAA sites tested (FIG. 37C). Third, to further increase selection stringency, we removed gene VI (gVI), which is essential for phage propagation, (Brödel et al., 2016) from the SP for use as a second selection marker (in addition to gIII) in PACE. This strategy allowed us to combine both selection modifications described above by requiring a split-dSpCas9 to bind each of two distinct protospacers in order to express both gIII and gVI (FIG. 37A).

[0454] Thus, three dSpCas9C clones from our previous evolutions (CAA.P2-1, CAA.P2-2, and CAA.P3-1) were subjected to this highest-stringency selection in PACE, resulting in additional mutations in the PID. Most notably, R1114G and L1318S were both highly enriched among sequenced surviving variants, which on average contained 20 non-silent mutations relative to SpCas9 (TAA.P4; FIG. 37B). When tested in mammalian cell CBE experiments, these variants showed little editing activity (FIG. 37C). We theorized that the large number of mutations present in these highly evolved variants, especially those outside of the PID, might prove deleterious to expression and/or inactivate either nuclease domain. To address this possibility, we performed DNA shuffling of the C-terminal portion (residues 574-1368) of the pool of variants from this final evolution with wild-type SpCas9(574-1368), allowing deleterious mutations to exit while shuffling mutations between the pool members, and re-subjected the resulting library to our most stringent binding selection. This “backcrossing” process led to the isolation of clone TAA.P4s-4 (R1114G, D1135N, V1139A, D1180G, E1219V, Q1221H, A1320V, R1333K) (FIGS. 37B and 37D), which demonstrated a 1.2-fold increase relative to the previous best PACE mutant across all HAA sites tested amongst our variants (FIG. 37C).

Evolution of SpCas9 Variants that Recognize NAT or NAC PAM Sequences

[0455] Based on the outcomes of the NAA PAM evolution campaigns, we approached the evolution of SpCas9 variants capable of recognizing NAT and NAC PAM sites in a fashion that avoids potentially deleterious bystander mutations. To ensure that we started with nuclease-active variants, we developed a modified version of a previously reported (Kleinstiver et al., 2015b) bacterial DNA cleavage selection (FIGS. 43E and 43F). In this nuclease selection, SpCas9 variants are challenged for their ability to cleave a protospacer-PAM sequence on a high-copy plasmid that also encodes a conditionally toxic gene (sacB). The surviving cells encode nuclease-active SpCas9 variants that cleave the target sequence, destroying the toxic plasmid.

[0456] Thus, we converted the dSpCas9 clones from the NAT or NAC PANCE pools into nuclease-active forms by restoring Asp 10 and His 840, then passed the resulting libraries through the nuclease selection using a TAT or CAC PAM, respectively. From this, we isolated two clones (SacB.TAT-1 and -2; FIG. 37E) that exhibited DNA cleavage activity on the TAT PAM with PID consensus mutations of D1135N, E1219V, Q1221H, P1321S, and R1335L, and a third clone that cleaved a CAC PAM with PID mutations N1135D, E1219V, D1332N, R1335Q, and T1337N (SacB.CAC; FIG. 37F). We evolved these nuclease-active TAT and CAC variants in split-dSpCas9 PACE using host cells encoding APs with either NAT (AAT or TAT) PAMs or NAC (AAC, TAC, or CAC) PAMs, respectively. These experiments resulted in the enrichment of several additional PID mutations, including R1114G, which arose independently in all three trajectories (NAA, NAT, and NAC) (FIGS. 37B, 37E, and 37F), suggesting that this mutation may be generally beneficial for modifying PAM recognition by the PID in a manner compatible with NA PAMs.

[0457] Next, we removed gVI from these evolved SP pools and subjected them to additional selection in split-dSpCas9 PACE using the dual-AP system (FIG. 37A and FIG. 43C). Both protospacers contained either an AAT or TAC PAM for evolution following the NAT or NAC trajectory, respectively. Increasing stringency for the NAT-targeting SpCas9 did not improve activity despite enrichment of several mutations (TAT.P6; FIGS. 37D and 44A). We therefore selected the most active NAT PAM-targeting variant from the split-dSpCas9 evolution (TAT.P5-1; FIG. 37D) to move forward with. This variant contained the 11 PID mutations R1114G, D1135N, D1180G, G1218S, E1219V, Q1221H, P1249S, E1253K, P1321S, D1332G, R1335L (FIGS. 37E and 37G). PACE of NAC-targeting splitdSpCas9 using dual protospacers and a TAC PAM also enriched for several mutations (TAC.P9; FIG. 37G). We shuffled residues 574-1368 of the surviving clones with that of SpCas9 and re-challenged the resulting library with our most stringent binding selection (TAC.P9s; FIG. 37G). From the surviving SP pool, we isolated clone TAC.P9s-3 with the PID mutations R1114G, D1135N, E1219V, D1332N, R1335Q, T1337N, S1338T, and H1249R (FIGS. 37F and 37H).

### Mutations Outside of the PID

[0458] Structural studies of SpCas9 suggest that residues in the PID mediate PAM specificity (Anders et al., 2014). Indeed, most of the previous efforts to engineer or evolve SpCas9 to accept alternative PAMs have focused on modulating this region of the protein (Kleinstiver et al., 2015b; Nishimasu et al., 2018). However, because our PANCE and PACE experiments allowed mutation of either the entire SpCas9 sequence or residues 574-1368 (in the case of split-intein w-dSpCas9), we observed the enrichment of many where from 3 to 15 mutations outside of the PID. Because many of these mutations fell within the RuvC or HNH nuclease domains, we anticipated that some would negatively impact SpCas9 nuclease activity (Jiang and Doudna, 2017). However, other mutations in the helical domain consistently enriched across several independent evolving populations, suggesting that they may confer a beneficial effect on SpCas9 DNA binding/unwinding. To minimize the deleterious effects from bystander mutation accumulation in the nuclease domains while preserving beneficial mutations in the helical domain, we decided to transplant our evolved PIDs onto a fixed N-terminal sequence that included the mutations T10A, I322V, S409I, E427G that we found to improve phage propagation in the split-dSpCas9 selection (FIG. 43D), as well as R654L and R753G, which consistently enriched across multiple independent PACE experiments (FIG. 44B).

[0459] The addition of all six NTD mutations to CBEs containing the PIDs of NAA variant TAA.P4s-4 and NAC variant TAC.P9s-3 improved CBE activity in mammalian cells across several sites when compared to SpCas9 variants containing only the evolved PID mutations (FIG. 44C). A smaller benefit was observed when the NTD mutations were added to the PID mutations of NAT variant TAT.P5-1 (FIG. 44C). We incorporated these six N-terminal mutations into all three final variants, hereafter referred to as SpCas9-NRRH, SpCas9-NRTH, and SpCas9-NRCH, which are the addition of T10A, I322V, S409I, E427G, R654L, and R753G to the evolved PID domains from TAA.P4s-4, TAT.P5-1, and TAC.P9s-3, respectively.

[0460] Characterization of PAM specificity through bacterial depletion

[0461] To better characterize the PAM specificities of our evolved variants as nucleases, we performed bacterial PAM depletion using a NNNN PAM library (Kleinstiver et al., 2015b). For comparison, we also performed depletion experiments with SpCas9-NG in parallel. Cells were plated after 1-hour, 3-hour, or overnight expression of the SpCas9 variant from an inducible promoter to assess kinetic differences in PAM sequence preference. Consistent with the eventual cleavage of even modestly recognized PAMs, depletion scores of any given PAM (defined as the frequency of the PAM in the input library divided by the frequency of the PAM post-selection) increased with longer induction times, with the shortest induction times resulting in the most noticeable sequence preferences (FIG. 45A).

[0462] For example, at shorter induction times, SpCas9-NRRH exhibited a strong preference for C at the 4th PAM position, a mixed preference for purines at positions 2 and 3 and a moderate preference for G at position 1 (FIG. 38A). However, longer induction times resulted in more relaxed preferences at all PAM positions. Similarly, SpCas9-NRCH showed a strong preference for G at position 2 and a moderate preference for pyrimidines at position 4 (FIG. 38A) at shorter inductions, but only a mixed enrichment for purines at position 2 was observable at longer induction times (FIGS. 38A and 45A). Finally, at short induction times, SpCas9-NRTH enriched strongly for G and T at positions 2 and 3, respectively (FIG. 38A), but the nucleotide preference at position 2 shifted to a mix of G and A at longer timepoints, suggesting that this variant recognizes and cleaves NAT PAMs more slowly than NGT PAMs. These results also suggest that SpCas9-NRTH may preferentially recognize NGT over NGG PAMs, as the NGT PAMs were more strongly depleted than NGG PAMs (average depletion score of 1394 for NGT compared to 223 for NGG at 1 h induction).

[0463] Interestingly, SpCas9-NG displayed a moderate preference for G at the 3rd and 4^{th} PAM position at short induction times. This finding is consistent with the T1337R mutation in SpCas9-NG, which is also found in SpCas9 VRER and VRQR (Kleinstiver et al., 2015b) and is the basis of the increased specificity for G at the 4th PAM position in these two variants (Anders et al., 2016; Hirano et al., 2016b; Kleinstiver et al., 2015b). Similar to the evolved SpCas9s described here, SpCas9-NG's PAM sequence requirements also became more relaxed with longer induction times (FIG. 45A). Evolved SpCas9 nucleases generate indels at endogenous human genomic loci

[0464] Next, we assessed the activity of our evolved variants in HEK293T cells through indel formation at 64 endogenous target sites spanning all possible NANN PAMs. For comparison, we also tested the activity of SpCas9-NG at these sites in parallel. Generally, each of our variants displayed the highest indel formation activity on target sites containing a PAM it was evolved to recognize, with SpCas9-NRRH and -NRTH showing an average of 23±4.5% and 23±4.1% indel formation on target sites containing NAAN and NATN PAMs, respectively. Sites containing NACN PAMs were edited at slightly lower efficiencies, with SpCas9-NRCH averaging 18±3.4% indel formation. Additionally, SpCas9-NRRH displayed 23±4.3% average indel formation on sites containing a NAG PAM, even though it had not been evolved to bind this PAM sequence (FIG. 3B). Indel formation activity of xCas9 was also examined at a subset of NAN sites and found to be minimal (FIG. 45B).

[0465] Interestingly, we also observed indel formation with SpCas9-NG at some NANN sites. Although its average indel formation across these sites was lower than our evolved variants, SpCas9-NG displayed activity at sites with NANG PAMs (NAAG: 12±1.7%, NACG: 14±3.0%, NATG: 23±3.6%, NAGG: 20±2.5% average indel formation) (FIG. 38B). In contrast, our evolved variants showed the lowest average activity at sites with PAM sequences with a G at position 4, and the highest at sites with a non-G (H) at this position (27±5.0%, 27±4.7%, 24±3.9%, and 27±4.4% average indel formation for SpCas9-NRRH, -NRTH, -NRCH, and -NRRH on NAAH, NATH, NACH, and NAGH PAMs, respectively) (FIGS. 38B and 38C). These results are consistent with the sequence preferences predicted by our bacterial PAM depletion experiments and suggest that our variants and SpCas9-NG exhibit complementary PAM specificities, especially with respect to non-G versus G bases at the 4th position.

[0466] We also tested the indel formation activity of our evolved variants and SpCas9-NG on a number of endogenous target sites containing NGN, rather than NAN, PAMs. While treatment with SpCas9-NG gave rise to robust indel formation on most NGN PAMs examined (48±4.4%), SpCas9-NRTH and -NRCH showed slightly higher activity than SpCas9-NG at NGT and NGC PAMs, with 68±3.9% and 42±2.5% average indel formation, respectively (FIG. 45C). Consistent with the PAM depletion assay results, a preference for H at position of the PAM was observed in these experiments for SpCas9-NRTH and -NRCH.

### DNA Specificity of Evolved SpCas9 Nucleases

[0467] As broadening the PAM targeting capabilities of various Cas9 has been shown to increase the proportion of genomic off-targets edits (Kleinstiver et al., 2015a; Nishimasu et al., 2018), we performed genome-wide, unbiased identification of double-strand breaks enabled by sequencing (GUIDE-seq) using SpCas9, SpCas9-NRRH, -NRCH, and -NRTH in U2OS cells (Tsai et al., 2015). For comparison, we also analyzed xCas9, which was previously shown to possess reduced off-target activity (Hu et al., 2018). These experiments showed that, when targeting the highly promiscuous HEK site 4 (HEK4) (Tsai et al., 2015), our evolved variants displayed comparable or better on-target activity (8.8%, 22.5%, and 7.8% on-target reads of total reads for SpCas9-NRRH, -NRTH, and -NRCH, respectively) when compared to SpCas9 (5.1% total reads) (FIGS. 38D and 45D). This is similar to xCas9, which also exhibited improved on-target activity (12.7% total reads) relative to SpCas9 (FIGS. 38D and 45D) (Hu et al., 2018). Interestingly, our variants primarily displayed off-target activity at sites containing PAMs consistent with their evolved preferences. For example, the most prominent off-target for SpCas9-NRRH occurs at a site bearing a CAA PAM (10% total reads), SpCas9-NRTH at a GGT PAM (10.2% total reads), and SpCas9-NRCH at a TGC PAM (9.9% total reads) (FIG. 45D).

[0468] Various off-targets were also observed at sites with NRN PAMs, such as GAA, GAT, and CAG, for these evolved SpCas9s (FIG. 45D). Taken together, these results suggest that our evolved variants may have similar or increased DNA specificity compared to SpCas9 on sites with NGG PAMs, and due to their altered PAM specificities may access a different set of off-target sequences.

### Evolved SpCas9s Support Cytosine and Adenine Base Editing

[0469] Since expanding the targeting scope of base editing was a major motivation behind our efforts, next we determined the ability of our evolved SpCas9s to support both cytosine and adenine base editing. We generated CBEs by incorporating our evolved variants into BE4max (Koblan et al., 2018) (hereafter referred to as “BE4”) in place of SpCas9 and tested their activity at the same 64 endogenous NANN PAM sites examined above for indel formation. As with their nuclease forms, each of the three evolved CBE variants showed the highest average activity on sites containing the PAM it was evolved to recognize. BE4-NRRH and BE4-NRTH performed best on NAAN and NATN PAMs with an average of 12±2.1% and 17±2.3% C⋅G to T⋅A conversion, respectively. CBE activity on NACN PAMs was slightly less efficient, with BE4-NRCH enabling the highest editing activity at these sites at an average of 11±1.7% base conversion. Both BE4-NRRH and BE4-NG (generated from SpCas9-NG) edit NAGN sites similarly, at 12±2.8% and 11±2.1% average base conversion (FIG. 39A).

[0470] Improved editing activity was again observed on sites with NANH PAMs, where C⋅G to T⋅A conversion at NAAH, NATH, NACH, and NAGH sites increasing to 14±2.4%, 21±2.5%, 13.0±2.0%, and 14±2.3 for BE4-NRRH, -NRTH, -NRCH, and -NRRH, respectively (FIGS. 39A and 39B). BE4-NG performed well at sites containing NANG PAMs, with 14±1.3% average editing (FIG. 39A). Average CBE editing efficiency across all 64 sites was lower than that of indel formation, likely due to increased requirements for efficient base editing such as sequence context and position of the C within the window.

[0471] These editors also function on sites with NGN PAMs, editing at 17±2.3%, 9.1±3.0%, 19±2.9% and 20±4.0% for BE4-NRRH, -NRTH, -NRCH, and -NG, respectively (FIG. 46A). Finally, we also generated ABEmax (Koblan et al., 2018) variants (hereafter referred to as “ABE”) from SpCas9-NRRH, -NRTH, -NRCH, and SpCas9-NG, and tested adenine base editing at 54 endogenous loci. We observed that the newly evolved variants are also compatible with adenine base editing, exhibiting similar performance on a subset of sites containing NAN and NGN PAMs as we observed for the corresponding CBEs and nucleases. For example, ABE-NRRH, -NRTH, -NRCH, and -NRRH edited most efficiently at NAAH, NATH, NACH, and NAGH PAMs, with 16±2.6%, 24±2.9%, 13±2.2%, and 26±3.5% base conversion (FIGS. 39C and 46B).

[0472] The scope of base editing is limited by the requirement that the target base be located within the canonical CBE or ABE editing window (approximately protospacer positions 4-8, counting the PAM as positions 21-23). The evolved variants SpCas9-NRRH, -NRCH, and -NRTH, together with SpCas9-NG and xCas9, expand the targeting scope of SpCas9 to sites to cover the vast majority of NR PAMs, greatly increasing the fraction of known human pathogenic SNPs that can in theory be corrected by base editing.

[0473] Among all pathogenic SNPs in the ClinVar database (Landrum et al., 2014) that are corrected by C⋅G to T⋅A conversion, 95% are targetable in principle with CBEs derived from SpCas9-NRRH, -NRCH, -NRTH, or SpCas9-NG/xCas9. Likewise, 95% of pathogenic SNPs in ClinVar that are correctable via A⋅T to G⋅C conversion can now be targeted with ABEs derived from the same set of Cas9 variants (FIG. 39D).

[0474] In addition, these new variants greatly increase the number of possible protospacers available for targeting a given SNP for base editing: on average, there are 2.7 protospacers per pathogenic SNP targetable with CBE and 2.7 protospacers for those targetable with ABE with NR PAMs, compared to 1.7 targetable with CBE and 1.7 targetable with ABE, respectively, when using NG PAMs, and 1.3 and 1.3 protospacers available when using NGG PAMs only to target CBE and ABE, respectively (FIG. 39E).

[0475] Since many pathogenic SNPs correctable by current base editors contain multiple targetable bases within the editing window (FIG. 46C), expansion to NR PAMs enables multiple targeting strategies for a given SNP to optimize editing of the desired base, as we explicitly demonstrate below.

[0476] Collectively, these findings establish that evolved Cas9 variants SpCas9-NRRH, -NRCH, and -NRTH are compatible with both CBEs and ABEs, and thereby expand the targeting scope of base editing substantially.

### Characterization of Evolved SpCas9s on a Human Cell Library of 11,776 Integrated Target Sites

[0477] To comprehensively profile the PAM preferences of these variants, we analyzed the CBE efficiencies of our three evolved variants, SpCas9-NG, and SpCas9 on a library of 11,776 unique sequences in human cells. This library was designed using 46 distinct protospacers derived from sequences found in the human genome, each with different sequence contexts surrounding a fixed C at protospacer position 6, counting the PAM as positions 21-23. Each protospacer is adjacent to a PAM sequence of 4Ns, and is additionally flanked with designated primer binding sites for amplification for high throughput sequencing (HTS) analysis (FIG. 40A).

[0478] Due to the very large number of target sites (FIG. 47A), characterization of our evolved variants in this library format revealed PAM preferences in finer detail when compared to our bacterial depletion and endogenous mammalian genomic site editing experiments (FIG. 40B). Consistent with these previous experiments, our evolved variants exhibited the highest editing activity when either A or G was present at the 2^{nd} PAM position (FIGS. 40C and 47B), when the 3rd PAM base was the one on which it was evolved (FIGS. 40D and 47B), and when a non-G was present at the 4th position of the PAM (FIGS. 40E and 47B). BE4-NG also showed the highest editing activity when either A or G was present at the 2nd PAM position (FIG. 40C), but, unlike our evolved variants, was most active when a G was present at the 4th position of the PAM (FIGS. 40E and 47B) or when G or T was in the 3^{rd} position (FIG. 40D). In contrast, we found that BE4 editing efficiency at sites containing its canonical NGG PAM or its alternate NAG/NGA PAMs showed virtually no dependence on the 4th PAM nucleotide (FIG. 40B). BE4 also showed some editing at sites containing a NCGG or NTGG PAM, which could be due to PAM slippage (Jiang et al., 2013), resulting in binding to a canonical NGG sequence.

[0479] Interestingly, our evolved variants and SpCas9-NG exhibit some level of editing activity at many more non-canonical PAMs when compared to SpCas9, supporting their broadened PAM scope (FIG. 40B). Finally, both SpCas9-NG and our variants (most notably BE4-NRRH) performed best when a G was present at position 1 of the PAM and worst when a T was at this position; in contrast, BE4 exhibited only a slight preference for G at position 1 (FIGS. 40B, 47B, and 47C). Taken together, these results strongly support the PAM preferences observed in our bacterial depletion and endogenous mammalian genome editing experiments: specifically, recognition of NRRH, NRCH, NRTH, and NRNG PAMs for SpCas9-NRRH, -NRCH, -NRTH, and -NG, respectively.

[0480] Additionally, this library allowed us to investigate the tolerance of our variants to mismatches between the sgRNA and the target DNA sequence. The U6 promoter, commonly used to express sgRNAs in mammalian cells, initiates transcription with a 5′ G. If a G is not natively present at the 5′ end of the protospacer, guide sequences are typically either extended to the next native G, or simply transcribed with a mismatched 5′ G at position −1 of the guide sequence. However, high-fidelity (HF) SpCas9s (Chen et al., 2017; Hu et al., 2018; Kleinstiver et al., 2016; Lee et al., 2018b; Slaymaker et al., 2016), which are less tolerant of mismatches between the protospacer and sgRNA, generally exhibit decreased efficiency when using a 21 nucleotide (nt) guide with a mismatched 5′ G (Kim et al., 2017b; Zhang et al., 2017). Because PACE has previously led to SpCas9s with HF properties (Hu et al., 2018), we sought to determine if our new variants shared the same characteristics.

[0481] We investigated the average base editing activity of our evolved variants across all 11,776 library sites containing either a 20 nt protospacer with a matched 5′ G (“20-matched”), a 21 nt protospacer with a matched 5′ G (“21-matched”), or a 21 nt protospacer with a mismatched 5′G (“21-mismatched”). Our three evolved SpCas9 variants and SpCas9 all showed the highest base editing activity with a 20-matched sgRNA (FIGS. 40F, 40G, and 47D-F; however, interestingly, SpCas9-NG performed best with a 21-matched sgRNA (FIGS. 40F and 47D-F). When examining all NRNN PAMs, our variants and SpCas9 also showed a significant decrease in base editing efficiency when the sgRNA protospacer was increased to 21 nt, regardless if the 5′ G was matched with the target sequence (FIGS. 40F, 40G, 47D, and 47E); in contrast, for SpCas9-NG this was only true when the 21-mismatched sgRNA (FIGS. 40G, 47D, and 47E). The magnitude of this decrease was similar to or greater for our evolved variants (SpCas9-NRRH: 23±2.7%, SpCas9-NRTH: 12±2.9%, SpCas9-NRCH: 14±2.9%) when compared to SpCas9 (13±5.3%). In contrast, SpCas9-NG demonstrated a preference for 21-matched sgRNAs, leading to an average 18.5±5.4% increase of editing efficiency when compared to 20-matched sgRNAs (FIGS. 40F, 47D, and 47E); however, a decrease in editing efficiency was still observed with 21-mismatched sgRNAs (7.3±3.2%, FIGS. 40G, 47D, and 47E). Interestingly, the deleterious effect of using a 21 nt protospacer on the editing efficiency of our evolved variants and SpCas9 is lessened when targeting sites with NGNN or NGGN PAMs (FIGS. 40F, 40G, 47D, and 47F). This is especially true for SpCas9, which shows no significantly decreased base editing activity on sites with a 21 nt matched or mismatched protospacer when the PAM is NGG (FIGS. 40F and 47F). Together, these results suggest that our evolved variants are somewhat sensitive to the use of 21 nt sgRNA protospacers, and that this sensitivity is exacerbated by the presence of 5′G mismatches. Additionally, these experiments suggest that the optimal sgRNA protospacer length for SpCas9-NG may be longer than 20 nt.

### Evolved SpCas9s Enable Efficient Base Editing of a Pathogenic SNP

[0482] To demonstrate the utility of our evolved SpCas9 variants in a disease-relevant context, we targeted the Glu to Val point mutation at amino acid 6 of β-globin (HBB), which results in the HbS allele that is the most common cause of sickle-cell anemia (Rees et al., 2010). The HbS mutation arises from a GAG (Glu) to GTG (Val) codon change that cannot be reverted through current base editing technologies. However, this SNP can be edited with ABE to a GCG (Ala) through A⋅T to G⋅C conversion on the opposite strand (FIG. 41A). The resulting HBB E6A genotype, known as the hemoglobin Makassar allele (HbG), has been reported as clinically normal in homozygous and heterozygous individuals (Quentin Blackwell et al., 1970; Sangkitporn et al., 2002; Viprakasit et al., 2002).

[0483] Unfortunately, the only NGG or NGN PAMs available at this site place the target A at either protospacer position 2 or 9, respectively, which fall outside the optimal editing window for ABE (positions 4-7) (Rees and Liu, 2018). However, two alternative target protospacer sequences using a CAT or CAC PAM place the target A at either position 4 or 7, respectively, with a bystander A present at either position 6 or 9 leading to a silent CCT to CCC (Pro to Pro) mutation. Thus, we tested the ability of our evolved variants, along with SpCas9-NG, to convert the sickle-cell SNP to the Makassar mutation using these two protospacer sites with non-G PAMs. We transfected ABE-NRRH, -NRTH, and NRCH, or ABE-NG into HEK293T cells with homozygous GAG to GTG mutations at codon 6 of HBB (FIG. 48A). While ABEs derived from the SpCas9 variants evolved in this study supported substantial (14-55%) A⋅T-to-G⋅C conversion using guide RNAs targeting either the CAT PAM or the CAC PAM site, ABE-NG edited efficiently (40±0.2%) only using the protospacer sequence containing a CAT PAM (FIGS. 41B and 41C), perhaps due to the presence of a G at the 4th position of the CAT PAM, which improves SpCas9-NG's recognition of NAN PAMs (see above).

[0484] Unfortunately, editing using the CAT PAM protospacer occurred primarily at the silent bystander base (position 6), with the target A (position 4) showing less than 10% editing across all four ABEs tested (FIGS. 41B and 48B).

[0485] Target base conversion of GTG to GCG in codon 6 of HBB using the CAC PAM protospacer, however, was much more efficient. As expected, ABE-NRCH showed the highest editing activity, with 41±3.8% base conversion at the target A (position 7) and 13±3.2% at the silent bystander A (position 9). ABE-NRRH and ABE-NRTH achieved 29±4.3% and 14±2.8% conversion, respectively (FIGS. 41C and 48C). In comparison, ABE-NG showed negligible (1.0±0.5%) target base conversion activity at this site (FIGS. 41C and 48C). Collectively, these results demonstrate that our evolved SpCas9 variants enable efficient base editing of previously inaccessible disease-relevant SNPs using non-G PAMs, and furthermore highlight the utility of evaluating multiple protospacer/PAM sequences for targeting a desired SNP.

### Discussion

[0486] Here we report three new variants of SpCas9, evolved using phage-assisted continuous evolution (PACE), that are capable of recognizing NRRH (SEQ ID NO: 149), NRCH (SEQ ID NO: 150), and NRTH (SEQ ID NO: 151) PAM sequences. As our initial experiments suggested that increased selection stringency may be necessary to produce SpCas9 variants that were highly active on non-G PAMs, we developed several improved selection strategies for evolving Cas9:DNA binding. Specifically, by increasing the number of target DNA protospacer/PAM sites that must be recognized by the evolving SpCas9 through use of an additional PACE-compatible selection marker (gVI), and limiting the total concentration of full-length SpCas9 in the host cell through use of a split-intein strategy, we were able to select for variants that efficiently recognize a desired PAM while reducing the probability of evolving undesired recognition of specific protospacer sequences. These improved selection strategies should be applicable to a majority of Cas9 orthologs, and enable the further evolution of Cas9 variants capable of targeting a wide range of PAM sequences.

[0487] From our initial experiments evolving SpCas9 for binding activity on all 16 individual NAN PAMs, we were able to identify three distinct groups of consensus mutations that conferred binding activity on NAA, NAT, and NAC PAMs, respectively (FIG. 1D), leading us to split our subsequent evolutionary efforts into three separate trajectories to target these specific PAMs. Accordingly, the diverging consensus mutations of our evolved variants give insight to potential modes of PAM interaction.

[0488] SpCas9-NRRH, evolved to bind HAA PAMs, acquired a mutation at R1333, which in SpCas9 contacts the 2nd guanine in its canonical PAM, but not R1335, which contacts the 3rd NGG guanine (FIGS. 37B and 37D). The R1333K mutation likely allows SpCas9-NRRH to accept both A and G at the 2nd PAM nucleotide, while the preservation of R1335 may explain why this variant recognizes both NAA and NAG PAMs. On the other hand, SpCas9-NRTH (evolved to bind HAT PAMs) preserves R1333 but eliminates R1335 through mutation to a Leu (FIGS. 37E and 37G). Interestingly, SpCas9-NRTH shows a strong preference for T in the 3rd PAM position and appears to have lost some recognition of the wild-type NGG PAM (FIG. 40B). Finally, SpCas9-NRCH displays altered interactions at both R1335 and T1337 (FIGS. 37F and 37H); the T1337N in particular may form contacts with a 4th PAM nucleotide to compensate for weakened binding interactions with the HAC target PAM.

[0489] In addition to alterations at residues responsible for direct contacts with PAM nucleobases, we observed a number of additional mutations which we suspect modulate more general interactions with the target- and non-target DNA, including R1114G, E1219V, Q1221H, and D1135N (FIG. 37B, 37D-H). Residue E1219 forms hydrogen bonds with R1335 in SpCas9, and mutations at this residue are thought to destabilize the interaction between R1335 and the 3rd PAM guanine. Mutations at residue D1135 have been previously reported and are thought to modulate interactions with the sugarphosphate backbone of the non-target DNA strand; R1114G and Q1221H may alter similar interactions. Finally, we observed mutations in the helical domain of Cas9 that arose in several independently evolving populations (FIG. 44B).

[0490] These mutations, when added to the N-terminal region of NRRH and NRCH, improve their recognition of non-G PAMs in base editing experiments (FIG. 44C), and may contribute to increasing the overall DNA binding/unwinding activity of these variants. Along with bacterial PAM depletion and mammalian cell genome editing on endogenous genomic sites spanning all NANN PAMs, we characterized our variants and SpCas9-NG using a 11,776-member sgRNA/protospacer/NNNN PAM library that was genomically integrated into HEK293T cells. The large number of sites examined greatly increases our ability to confidently profile the editing activity of these proteins using all NNNN PAMs in a human cell context, and illuminated the sequence preferences of these Cas9 variants, including previously uncovered activity of SpCas9-NG on NANG PAMs.

[0491] Both our bacterial PAM depletion experiments and mammalian library data demonstrated that our evolved variants display a different 4th base PAM preference (H) compared to SpCas9-NG (G), suggesting that they may have complimentary utility. While further investigation is required to explain the 4th base preferences of our mutants, crystal structures of SpCas9-NG and other previously reported evolved SpCas9s (VRER/VRQR) suggest that the T1337R mutation in these variants may create a direct interaction with the 4th base G (Anders et al., 2016; Hirano et al., 2016b; Nishimasu et al., 2018).

[0492] Additionally, both SpCas9-NG and our variants display a moderate preference for G at the 1st PAM position, whereas this preference in this position in SpCas9 is virtually nonexistent (FIGS. 47B and 47C). Because of these numerous sequence preferences, we suggest screening all variants reported here along with SpCas9-NG when optimizing targeting efficiency on sites with NR PAMs, and provide a recommended list of SaCas9 and SpCas9 variants to test for targeting any given NRNN PAM (FIG. 42). However, we note that other Cas9 orthologs and related CRISPR effector proteins not included here have been also been shown to mediate genome editing in mammalian cells (Chatterjee et al., 2018; Cong et al., 2013; Edraki et al., 2019; Esvelt et al., 2013; Harrington et al., 2017; Hirano et al., 2016a; Hou et al., 2013; Kim et al., 2017a; Zetsche et al., 2015). Our evolved variants, along with SpCas9-NG, expand the utility of SpCas9 towards disease-relevant genome editing applications. Access to a broad range of PAMs is especially essential for base editing, as illustrated by our experiments targeting the sickle cell mutation of human β-globin. While ABE-NG was able to bind to this locus using a CATG PAM, the majority of base editing we observed occurred at an off-target A within the window (FIG. 41B). However, we were able to achieve high levels of conversion at the correct base and lower levels of off-target editing with our evolved variants by using an adjacent CACC PAM (FIG. 41C). Notably, the sickle cell SNP occurs within the optimal ABE window for both sgRNAs tested, suggesting that it may be beneficial to assay several protospacer sequences for a single target. Expanding the PAMs accessible by Cas9 variants to NR increases not only the number of targetable pathogenic SNPs (FIG. 39D), but also the number of possible sgRNAs that can target an individual SNP (FIG. 39E). Additionally, although only results from indel formation and base editing are shown in this work, we anticipate that our evolved variants should be compatible with the majority of Cas9-associated genome editing technologies. Access to NR PAMs should benefit all precision genome editing applications, including other base editing applications, HDR, and predictable template-free genome editing.

### Example 13 Refernces

[0493] The following references are incorporated herein by reference.
[0494] Anders, C., Niewoehner, O., Duerst, A., and Jinek, M. (2014). Structural basis of PAMdependent target DNA recognition by the Cas9 endonuclease. Nature 513, 569-573.
[0495] Anders, C., Bargsten, K., and Jinek, M. (2016). Structural Plasticity of PAM Recognition by Engineered Variants of the RNA-Guided Endonuclease Cas9. Mol. Cell 61, 895-902.
[0496] Badran, A. H., Guzov, V. M., Huai, Q., Kemp, M. M., Vishwanath, P., Kain, W., Nance, A. M., Evdokimov, A., Moshiri, F., Turner, K. H., et al. (2016). Continuous evolution of Bacillus thuringiensis toxins overcomes insect resistance. Nature 533, 58-63.
[0497] Brödel, A. K., Jaramillo, A., and Isalan, M. (2016). Engineering orthogonal dual transcription factors for multi-input synthetic promoters. Nat. Commun. 7, 13858.
[0498] Bryson, D. I., Fan, C., Guo, L.-T., Miller, C., Söll, D., and Liu, D. R. (2017). Continuous directed evolution of aminoacyl-tRNA synthetases. Nat. Chem. Biol. 13, 1253-1260.
[0499] Carlson, J. C., Badran, A. H., Guggiana-nilo, D. A., and Liu, D. R. (2014). Negative selection and stringency modulation in phage-assisted continuous evolution. Nat. Chem. Biol. 10, 216-222.
[0500] Cebrian-Serrano, A., and Davies, B. (2017). CRISPR-Cas orthologues and variants: optimizing the repertoire, specificity and delivery of genome engineering tools. Mamm. Genome 28, 247-261.
[0501] Chatterjee, P., Jakimo, N., and Jacobson, J. M. (2018). Minimal PAM specificity of a highly similar SpCas9 ortholog. Sci. Adv. 4, eaau0766.
[0502] Chen, J. S., Dagdas, Y. S., Kleinstiver, B. P., Welch, M. M., Sousa, A. A., Harrington, L. B., Sternberg, S. H., Joung, J. K., Yildiz, A., and Doudna, J. A. (2017). Enhanced proofreading governs CRISPR-Cas9 targeting accuracy. Nature 550, 407-410.
[0503] Cong, L., Ran, F. A., Cox, D., Lin, S., Barretto, R., Habib, N., Hsu, P. D., Wu, X., Jiang, W., Marraffini, L. A., et al. (2013). Multiplex genome engineering using CRISPR/Cas systems. Science (80-.). 339, 819-823.
[0504] Dickinson, B. C., Leconte, A. M., Allen, B., Esvelt, K. M., and Liu, D. R. (2013). Experimental interrogation of the path dependence and stochasticity of protein evolution using phage-assisted continuous evolution. Proc. Natl. Acad. Sci. 110, 9007-9012.
[0505] Dickinson, B. C., Packer, M. S., Badran, A. H., and Liu, D. R. (2014). A system for the continuous directed evolution of proteases rapidly reveals drug-resistance mutations. Nat. Commun. 5, 5352.
[0506] Edraki, A., Mir, A., Ibraheim, R., Gainetdinov, I., Yoon, Y., Song, C. Q., Cao, Y., Gallant, J., Xue, W., Rivera-Pérez, J. A., et al. (2019). A Compact, High-Accuracy Cas9 with a Dinucleotide PAM for In Vivo Genome Editing. Mol. Cell 73, 714-726.e4.
[0507] Esvelt, K. M., Carlson, J. C., and Liu, D. R. (2011). A system for the continuous directed evolution of biomolecules. Nature 472, 499-503.
[0508] Esvelt, K. M., Mali, P., Braff, J. L., Moosburner, M., Yaung, S. J., and Church, G. M. (2013). Orthogonal Cas9 proteins for RNA-guided gene regulation and editing. Nat. Methods 10, 1116-1121.
[0509] Gaudelli, N. M., Komor, A. C., Rees, H. A., Packer, M. S., Badran, A. H., Bryson, D. I., and Liu, D. R. (2017). Programmable base editing of T to G C in genomic DNA without DNA cleavage. Nature 551, 464-471.
[0510] Harrington, L. B., Paez-Espino, D., Staahl, B. T., Chen, J. S., Ma, E., Kyrpides, N.C., and Doudna, J. A. (2017). A thermostable Cas9 with increased lifetime in human plasma. Nat. Commun. 8, 1424.
[0511] Hirano, H., Gootenberg, J. S., Horii, T., Abudayyeh, O. O., Kimura, M., Hsu, P. D., Nakane, T., Ishitani, R., Hatada, I., Zhang, F., et al. (2016a). Structure and Engineering of Francisella novicida Cas9. Cell 164, 950-961.
[0512] Hirano, S., Nishimasu, H., Ishitani, R., and Nureki, O. (2016b). Structural Basis for the Altered PAM Specificities of Engineered CRISPR-Cas9. Mol. Cell 61, 886-894.
[0513] Hou, Z., Zhang, Y., Propson, N. E., Howden, S. E., Chu, L.-F., Sontheimer, E. J., and Thomson, J. A. (2013). Efficient genome engineering in human pluripotent stem cells using Cas9 from Neisseria meningitidis. Proc. Natl. Acad. Sci. 110, 15644-15649.
[0514] Hu, J. H., Miller, S. M., Geurts, M. H., Tang, W., Chen, L., Sun, N., Zeina, C. M., Gao, X., Rees, H. A., Lin, Z., et al. (2018). Evolved Cas9 variants with broad PAM compatibility and high DNA specificity. Nature 556, 57-63.
[0515] Hubbard, B. P., Badran, A. H., Zuris, J. A., Guilinger, J. P., Davis, K. M., Chen, L., Tsai, S. Q., Sander, J. D., Joung, J. K., and Liu, D. R. (2015). Continuous directed evolution of DNA-binding proteins to improve TALEN specificity. Nat. Methods 12, 939-942.
[0516] Jiang, F., and Doudna, J. A. (2017). CRISPR-Cas9 Structures and Mechanisms. Annu. Rev. Biophys. 46, 505-529.
[0517] Jiang, W., Bikard, D., Cox, D., Zhang, F., and Marraffini, L. A. (2013). RNA-guided editing of bacterial genomes using CRISPR-Cas systems. Nat. Biotechnol. 31, 233-239.
[0518] Jin, S., Zong, Y., Gao, Q., Zhu, Z., Wang, Y., Qin, P., Liang, C., Wang, D., Qiu, J. L., Zhang, F., et al. (2019). Cytosine, but not adenine, base editors induce genome-wide off-target mutations in rice. Science (80-.). 364, 292-295.
[0519] Jinek, M., Chylinski, K., Fonfara, I., Hauer, M., Doudna, J. A., and Charpentier, E. (2012). A programmable dual-RNA-guided DNA endonuclease in adaptive bacterial immunity. Science (80-.). 337, 816-821.
[0520] Karvelis, T., Gasiunas, G., Young, J., Bigelyte, G., Silanskas, A., Cigan, M., and Siksnys, V. (2015). Rapid characterization of CRISPR-Cas9 protospacer adjacent motif sequence elements. Genome Biol. 16, 253.
[0521] Kim, E., Koo, T., Park, S. W., Kim, D., Kim, K., Cho, H. Y., Song, D. W., Lee, K. J., Jung, M. H., Kim, S., et al. (2017a). In vivo genome editing with a small Cas9 orthologue derived from Campylobacter jejuni. Nat. Commun. 8, 14500.
[0522] Kim, S., Bae, T., Hwang, J., and Kim, J. S. (2017b). Rescue of high-specificity Cas9 variants using sgRNAs with matched 5′ nucleotides. Genome Biol. 18, 218.
[0523] Kleinstiver, B. P., Prew, M. S., Tsai, S. Q., Nguyen, N. T., Topkar, V. V, Zheng, Z., and Joung, J. K. (2015a). Broadening the targeting range of Staphylococcus aureus CRISPR-Cas9 by modifying PAM recognition. Nat. Biotechnol. 33, 1293-1298.
[0524] Kleinstiver, B. P., Prew, M. S., Tsai, S. Q., Topkar, V. V, Nguyen, N. T., Zheng, Z., Gonzales, A. P. W., Li, Z., Peterson, R. T., Yeh, J. R. J., et al. (2015b). Engineered CRISPR-Cas9 nucleases with altered PAM specificities. Nature 523, 481-485.
[0525] Kleinstiver, B. P., Pattanayak, V., Prew, M. S., Tsai, S. Q., Nguyen, N. T., Zheng, Z., and Joung, J. K. (2016). High-fidelity CRISPR-Cas9 nucleases with no detectable genomewide off-target effects. Nature 529, 490-495.
[0526] Koblan, L. W., Doman, J. L., Wilson, C., Levy, J. M., Tay, T., Newby, G. A., Maianti, J. P., Raguram, A., and Liu, D. R. (2018). Improving cytidine and adenine base editors by expression optimization and ancestral reconstruction. Nat. Biotechnol. 36, 843-846.
[0527] Komor, A. C., Kim, Y. B., Packer, M. S., Zuris, J. A., and Liu, D. R. (2016). Programmable editing of a target base in genomic DNA without double-stranded DNA cleavage. Nature 533, 420-424.
[0528] Komor, A. C., Badran, A. H., and Liu, D. R. (2017). CRISPR-Based Technologies for the Manipulation of Eukaryotic Genomes. Cell 168, 20-36.
[0529] Landrum, M. J., Lee, J. M., Riley, G. R., Jang, W., Rubinstein, W. S., Church, D. M., and Maglott, D. R. (2014). ClinVar: public archive of relationships among sequence variation and human phenotype. Nucleic Acids Res. 42, D980-D985.
[0530] Lee, H. K., Willi, M., Miller, S. M., Kim, S., Liu, C., Liu, D. R., and Hennighausen, L. (2018a). Targeting fidelity of adenine and cytosine base editors in mouse embryos. Nat. Commun. 9, 4804
[0531] Lee, J. K., Jeong, E., Lee, J., Jung, M., Shin, E., Kim, Y.-H., Lee, K., Jung, I., Kim, D., Kim, S., et al. (2018b). Directed evolution of CRISPR-Cas9 to increase its specificity. Nat. Commun. 9, 3048.
[0532] Nishimasu, H., Shi, X., Ishiguro, S., Gao, L., Hirano, S., Okazaki, S., Noda, T., Abudayyeh, O. O, Gootenberg, J. S., Mori, H., et al. (2018). Engineered CRISPR-Cas9 nuclease with expanded targeting space. Science (80-.). 361, 1259-1262.
[0533] Packer, M. S., Rees, H. A., and Liu, D. R. (2017). Phage-assisted continuous evolution of proteases with altered substrate specificity. Nat. Commun. 8, 956.
[0534] Paquet, D., Kwart, D., Chen, A., Sproul, A., Jacob, S., Teo, S., Olsen, K. M., Gregg, A., Noggle, S., and Tessier-Lavigne, M. (2016). Efficient introduction of specific homozygous and heterozygous mutations using CRISPR/Cas9. Nature 533, 125-129.
[0535] Pu, J., Zinkus-Boltz, J., and Dickinson, B. C. (2017). Evolution of a split RNA polymerase as a versatile biosensor platform. Nat. Chem. Biol. 13, 432-438.
[0536] Quentin Blackwell, R., Oemijati, S., Pribadi, W., Weng, M. I., and Liu, C. S. (1970).
[0537] Hemoglobin G Makassar: β6 Glu→Ala. BBA—Protein Struct. 214, 396-401.
[0538] Rees, H. A., and Liu, D. R. (2018). Base editing: precision chemistry on the genome and transcriptome of living cells. Nat. Rev. Genet. 19, 770-778.
[0539] Rees, D. C., Williams, T. N., and Gladwin, M. T. (2010). Sickle-cell disease. Lancet 376, 45 2018-2031.
[0540] Roth, T. B., Woolston, B. M., Stephanopoulos, G., and Liu, D. R. (2019). Phage-Assisted Evolution of Bacillus methanolicus Methanol Dehydrogenase 2. ACS Synth. Biol. 8, 796-806.
[0541] Sangkitporn, S., Rerkamnuaychoke, B., Sangkitporn, S., Mitrakul, C., and Sutivigit, Y. (2002). Hb G Makassar (beta 6: Glu→Ala) in a Thai Family. 85, 577-582.
[0542] Shen, M. W., Arbab, M., Hsu, J. Y., Worstell, D., Culbertson, S. J., Krabbe, O., Cassa, C. A., Liu, D. R., Gifford, D. K., and Sherwood, R. I. (2018). Predictable and precise template-free CRISPR editing of pathogenic variants. Nature 563, 646-651.
[0543] Slaymaker, I. M., Gao, L., Zetsche, B., Scott, D. A., Yan, W. X., and Zhang, F. (2016).
[0544] Rationally engineered Cas9 nucleases with improved specificity. Science (80-.). 351, 84-88.
[0545] Suzuki, T., Miller, C., Guo, L. T., Ho, J. M. L., Bryson, D. I., Wang, Y. S., Liu, D. R., and Söll, D. (2017). Crystal structures reveal an elusive functional domain of pyrrolysyl-tRNAsynthetase. Nat. Chem. Biol. 13, 1261-1266.
[0546] Tsai, S. Q., Zheng, Z., Nguyen, N. T., Liebers, M., Topkar, V. V, Thapar, V., Wyvekens, N., Khayter, C., Iafrate, A. J., Le, L. P., et al. (2015). GUIDE-seq enables genome-wide profiling of off-target cleavage by CRISPR-Cas nucleases. Nat. Biotechnol. 33, 187-197.
[0547] Viprakasit, V., Wiriyasateinkul, A., Sattayasevana, B., Miles, K. L., and Laosombat, V. (2002). Hb G-Makassar [β6(A3)Glu→Ala; codon 6 (GAG→GCG)]: Molecular characterization, clinical, and hematological effects. Hemoglobin 26, 245-253
[0548] Wang, T., Badran, A. H., Huang, T. P., and Liu, D. R. (2018). Continuous directed evolution of proteins with improved soluble expression. Nat. Chem. Biol. 14, 972-980.
[0549] Xin, H., Wan, T., and Ping, Y. (2019). Off-Targeting of Base Editors: BE3 but not ABE induces substantial off-target single nucleotide variants. Signal Transduct. Target. Ther. 4, 9
[0550] Zetsche, B., Gootenberg, J. S., Abudayyeh, O. O., Slaymaker, I. M., Makarova, K. S., Essletzbichler, P., Volz, S. E., Joung, J., Van Der Oost, J., Regev, A., et al. (2015). Cpf1 Is a Single RNA-Guided Endonuclease of a Class 2 CRISPR-Cas System. Cell 163, 759-771. 46
[0551] Zhang, D., Zhang, H., Li, T., Chen, K., Qiu, J. L., and Gao, C. (2017). Perfectly matched 20-nucleotide guide RNA sequences enable robust genome editing using high-fidelity SpCas9 nucleases. Genome Biol. 18, 191.
[0552] Zuo, E., Sun, Y., Wei, W., Yuan, T., Ying, W., Sun, H., Yuan, L., Steinmetz, L. M., Li, Y., and Yang, H. (2019). Cytosine base editor generates substantial off-target single nucleotide variants in mouse embryos. Science (80-.). 364, 289-292.

SEQUENCES

| SEQ | | |
|---|---|---|
| ID | | Description of |
| NO: | Sequence | Sequence |
| | Cas9 sequences | |
| 1 | ATGGATAAGAAATACTCAATAGGCTTAGATATCGGCACAAATAGCGTCGGATGGGCGGTGATCACTGATGATTATAAGGTTCCGTCTAAAAAGTTCAAGGTTCTGGGAAATACAGACCG | NC_017053.1 Cas9 |
| | CCACAGTATCAAAAAAAATCTTATAGGGGCTCTTTTATTTGGCAGTGGAGAGACAGCGGAAGCGACTCGTCTCAAACGGACAGCTCGTAGAAGGTATACACGTCGGAAGAATCGTATTT | wild type |
| | GTTATCTACAGGAGATTTTTTCAAATGAGATGGCGAAAGTAGATGATAGTTTCTTTCATCGACTTGAAGAGTCTTTTTTGGTGGAAGAAGACAAGAAGCATGAACGTCATCCTATTTTT | [Streptococcus |
| | GGAAATATAGTAGATGAAGTTGCTTATCATGAGAAATATCCAACTATCTATCATCTGCGAAAAAAATTGGCAGATTCTACTGATAAAGCGGATTTGCGCTTAATCTATTTGGCCTTAGC | pyogenes |
| | GCATATGATTAAGTTTCGTGGTCATTTTTTGATTGAGGGAGATTTAAATCCTGATAATAGTGATGTGGACAAACTATTTATCCAGTTGGTACAAATCTACAATCAATTATTTGAAGAAA | MGAS1882] |
| | ACCCTATTAACGCAAGTAGAGTAGATGCTAAAGCGATTCTTTCTGCACGATTGAGTAAATCAAGACGATTAGAAAATCTCATTGCTCAGCTCCCCGGTGAGAAGAGAAATGGCTTGTTT | |
| | GGGAATCTCATTGCTTTGTCATTGGGATTGACCCCTAATTTTAAATCAAATTTTGATTTGGCAGAAGATGCTAAATTACAGCTTTCAAAAGATACTTACGATGATGATTTAGATAATTT | |
| | ATTGGCGCAAATTGGAGATCAATATGCTGATTTGTTTTTGGCAGCTAAGAATTTATCAGATGCTATTTTACTTTCAGATATCCTAAGAGTAAATAGTGAAATAACTAAGGCTCCCCTAT | |
| | CAGCTTCAATGATTAAGCGCTACGATGAACATCATCAAGACTTGACTCTTTTAAAAGCTTTAGTTCGACAACAACTTCCAGAAAAGTATAAAGAAATCTTTTTTGATCAATCAAAAAAC | |
| | GGATATGCAGGTTATATTGATGGGGGAGCTAGCCAAGAAGAATTTTATAAATTTATCAAACCAATTTTAGAAAAAATGGATGGTACTGAGGAATTATTGGTGAAACTAAATCGTGAAGA | |
| | TTTGCTGCGCAAGCAACGGACCTTTGACAACGGCTCTATTCCCCATCAAATTCACTTGGGTGAGCTGCATGCTATTTTGAGAAGACAAGAAGACTTTTATCCATTTTTAAAAGACAATC | |
| | GTGAGAAGATTGAAAAAATCTTGACTTTTCGAATTCCTTATTATGTTGGTCCATTGGCGCGTGGCAATAGTCGTTTTGCATGGATGACTCGGAAGTCTGAAGAAACAATTACCCCATGG | |
| | AATTTTGAAGAAGTTGTCGATAAAGGTGCTTCAGCTCAATCATTTATTGAACGCATGACAAACTTTGATAAAAATCTTCCAAATGAAAAAGTACTACCAAAACATAGTTTGCTTTATGA | |
| | GTATTTTACGGTTTATAACGAATTGACAAAGGTCAAATATGTTACTGAGGGAATGCGAAAACCAGCATTTCTTTCAGGTGAACAGAAGAAAGCCATTGTTGATTTACTCTTCAAAACAA | |
| | ATCGAAAAGTAACCGTTAAGCAATTAAAAGAAGATTATTTCAAAAAAATAGAATGTTTTGATAGTGTTGAAATTTCAGGAGTTGAAGATAGATTTAATGCTTCATTAGGCGCCTACCAT | |
| | GATTTGCTAAAAATTATTAAAGATAAAGATTTTTTGGATAATGAAGAAAATGAAGATATCTTAGAGGATATTGTTTTAACATTGACCTTATTTGAAGATAGGGGGATGATTGAGGAAAG | |
| | ACTTAAAACATATGCTCACCTCTTTGATGATAAGGTGATGAAACAGCTTAAACGTCGCCGTTATACTGGTTGGGGACGTTTGTCTCGAAAATTGATTAATGGTATTAGGGATAAGCAAT | |
| | CTGGCAAAACAATATTAGATTTTTTGAAATCAGATGGTTTTGCCAATCGCAATTTTATGCAGCTGATCCATGATGATAGTTTGACATTTAAAGAAGATATTCAAAAAGCACAGGTGTCT | |
| | GGACAAGGCCATAGTTTACATGAACAGATTGCTAACTTAGCTGGCAGTCCTGCTATTAAAAAAGGTATTTTACAGACTGTAAAAATTGTTGATGAACTGGTCAAAGTAATGGGGCATAA | |
| | GCCAGAAAATATCGTTATTGAAATGGCACGTGAAAATCAGACAACTCAAAAGGGCCAGAAAAATTCGCGAGAGCGTATGAAACGAATCGAAGAAGGTATCAAAGAATTAGGAAGTCAGA | |
| | TTCTTAAAGAGCATCCTGTTGAAAATACTCAATTGCAAAATGAAAAGCTCTATCTCTATTATCTACAAAATGGAAGAGACATGTATGTGGACCAAGAATTAGATATTAATCGTTTAAGT | |
| | GATTATGATGTCGATCACATTGTTCCACAAAGTTTCATTAAAGACGATTCAATAGACAATAAGGTACTAACGCGTTCTGATAAAAATCGTGGTAAATCGGATAACGTTCCAAGTGAAGA | |
| | AGTAGTCAAAAAGATGAAAAACTATTGGAGACAACTTCTAAACGCCAAGTTAATCACTCAACGTAAGTTTGATAATTTAACGAAAGCTGAACGTGGAGGTTTGAGTGAACTTGATAAAG | |
| | CTGGTTTTATCAAACGCCAATTGGTTGAAACTCGCCAAATCACTAAGCATGTGGCACAAATTTTGGATAGTCGCATGAATACTAAATACGATGAAAATGATAAACTTATTCGAGAGGTT | |
| | AAAGTGATTACCTTAAAATCTAAATTAGTTTCTGACTTCCGAAAAGATTTCCAATTCTATAAAGTACGTGAGATTAACAATTACCATCATGCCCATGATGCGTATCTAAATGCCGTCGT | |
| | TGGAACTGCTTTGATTAAGAAATATCCAAAACTTGAATCGGAGTTTGTCTATGGTGATTATAAAGTTTATGATGTTCGTAAAATGATTGCTAAGTCTGAGCAAGAAATAGGCAAAGCAA | |
| | CCGCAAAATATTTCTTTTACTCTAATATCATGAACTTCTTCAAAACAGAAATTACACTTGCAAATGGAGAGATTCGCAAACGCCCTCTAATCGAAACTAATGGGGAAACTGGAGAAATT | |
| | GTCTGGGATAAAGGGCGAGATTTTGCCACAGTGCGCAAAGTATTGTCCATGCCCCAAGTCAATATTGTCAAGAAAACAGAAGTACAGACAGGCGGATTCTCCAAGGAGTCAATTTTACC | |
| | AAAAAGAAATTCGGACAAGCTTATTGCTCGTAAAAAAGACTGGGATCCAAAAAAATATGGTGGTTTTGATAGTCCAACGGTAGCTTATTCAGTCCTAGTGGTTGCTAAGGTGGAAAAAG | |
| | GGAAATCGAAGAAGTTAAAATCCGTTAAAGAGTTACTAGGGATCACAATTATGGAAAGAAGTTCCTTTGAAAAAAATCCGATTGACTTTTTAGAAGCTAAAGGATATAAGGAAGTTAAA | |
| | AAAGACTTAATCATTAAACTACCTAAATATAGTCTTTTTGAGTTAGAAAACGGTCGTAAACGGATGCTGGCTAGTGCCGGAGAATTACAAAAAGGAAATGAGCTGGCTCTGCCAAGCAA | |
| | ATATGTGAATTTTTTATATTTAGCTAGTCATTATGAAAAGTTGAAGGGTAGTCCAGAAGATAACGAACAAAAACAATTGTTTGTGGAGCAGCATAAGCATTATTTAGATGAGATTATTG | |
| | AGCAAATCAGTGAATTTTCTAAGCGTGTTATTTTAGCAGATGCCAATTTAGATAAAGTTCTTAGTGCATATAACAAACATAGAGACAAACCAATACGTGAACAAGCAGAAAATATTATT | |
| | CATTTATTTACGTTGACGAATCTTGGAGCTCCCGCTGCTTTTAAATATTTTGATACAACAATTGATCGTAAACGATATACGTCTACAAAAGAAGTTTTAGATGCCACTCTTATCCATCA | |
| | ATCCATCACTGGTCTTTATGAAACACGCATTGATTTGAGTCAGCTAGGAGGTGACTGA | |
| 2 | MDKKYSIGLDIGTNSVGWAVITDDYKVPSKKFKVLGNTDRHSIKKNLIGALLFGSGETAEATRLKRTARRRYTRRKNRICYLQEIFSNEMAKVDDSFFHRLEESFLVEEDKKHERHPIF | NC_017053.1 Cas9 |
| | GNIVDEVAYHEKYPTIYHLRKKLADSTDKADLRLIYLALAHMIKFRGHFLIEGDLNPDNSDVDKLFIQLVQIYNQLFEENPINASRVDAKAILSARLSKSRRLENLIAQLPGEKRNGLF | wild type |
| | GNLIALSLGLTPNFKSNFDLAEDAKLQLSKDTYDDDLDNLLAQIGDQYADLFLAAKNLSDAILLSDILRVNSEITKAPLSASMIKRYDEHHQDLTLLKALVRQQLPEKYKEIFFDQSKN | [Streptococcus |
| | GYAGYIDGGASQEEFYKFIKPILEKMDGTEELLVKLNREDLLRKQRTFDNGSIPHQIHLGELHAILRRQEDFYPFLKDNREKIEKILTFRIPYYVGPLARGNSRFAWMTRKSEETITPW | pyogenes |
| | NFEEVVDKGASAQSFIERMTNFDKNLPNEKVLPKHSLLYEYFTVYNELTKVKYVTEGMRKPAFLSGEQKKAIVDLLFKTNRKVTVKQLKEDYFKKIECFDSVEISGVEDRFNASLGAYH | MGA51882 |
| | DLLKIIKDKDFLDNEENEDILEDIVLTLTLFEDRGMIEERLKTYAHLFDDKVMKQLKRRRYTGWGRLSRKLINGIRDKQSGKTILDFLKSDGFANRNFMQLIHDDSLTFKEDIQKAQVS | |
| | GQGHSLHEQIANLAGSPAIKKGILQTVKIVDELVKVMGHKPENIVIEMARENQTTQKGQKNSRERMKRIEEGIKELGSQILKEHPVENTQLQNEKLYLYYLQNGRDMYVDQELDINRLS | |
| | DYDVDHIVPQSFIKDDSIDNKVLTRSDKNRGKSDNVPSEEVVKKMKNYWRQLLNAKLITQRKFDNLTKAERGGLSELDKAGFIKRQLVETRQITKHVAQILDSRMNTKYDENDKLIREV | |
| | KVITLKSKLVSDFRKDFQFYKVREINNYHHAHDAYLNAVVGTALIKKYPKLESEFVYGDYKVYDVRKMIAKSEQEIGKATAKYFFYSNIMNFFKTEITLANGEIRKRPLIETNGETGEI | |
| | VWDKGRDFATVRKVLSMPQVNIVKKTEVQTGGFSKESILPKRNSDKLIARKKDWDPKKYGGFDSPTVAYSVLVVAKVEKGKSKKLKSVKELLGITIMERSSFEKNPIDFLEAKGYKEVK | |
| | KDLIIKLPKYSLFELENGRKRMLASAGELQKGNELALPSKYVNFLYLASHYEKLKGSPEDNEQKQLFVEQHKHYLDEIIEQISEFSKRVILADANLDKVLSAYNKHRDKPIREQAENII | |
| | HLFTLTNLGAPAAFKYFDTTIDRKRYTSTKEVLDATLIHQSITGLYETRIDLSQLGGD | |
| 3 | ATGGATAAAAAGTATTCTATTGGTTTAGACATCGGCACTAATTCCGTTGGATGGGCTGTCATAACCGATGAATACAAAGTACCTTCAAAGAAATTTAAGGTGTTGGGGAACACAGACCG | Cas9 wild type |
| | TCATTCGATTAAAAAGAATCTTATCGGTGCCCTCCTATTCGATAGTGGCGAAACGGCAGAGGCGACTCGCCTGAAACGAACCGCTCGGAGAAGGTATACACGTCGCAAGAACCGAATAT | [Streptococcus |
| | GTTACTTACAAGAAATTTTTAGCAATGAGATGGCCAAAGTTGACGATTCTTTCTTTCACCGTTTGGAAGAGTCCTTCCTTGTCGAAGAGGACAAGAAACATGAACGGCACCCCATCTTT | pyogenes] |
| | GGAAACATAGTAGATGAGGTGGCATATCATGAAAAGTACCCAACGATTTATCACCTCAGAAAAAAGCTAGTTGACTCAACTGATAAAGCGGACCTGAGGTTAATCTACTTGGCTCTTGC | |
| | CCATATGATAAAGTTCCGTGGGCACTTTCTCATTGAGGGTGATCTAAATCCGGACAACTCGGATGTCGACAAACTGTTCATCCAGTTAGTACAAACCTATAATCAGTTGTTTGAAGAGA | |
| | ACCCTATAAATGCAAGTGGCGTGGATGCGAAGGCTATTCTTAGCGCCCGCCTCTCTAAATCCCGACGGCTAGAAAACCTGATCGCACAATTACCCGGAGAGAAGAAAAATGGGTTGTTC | |
| | GGTAACCTTATAGCGCTCTCACTAGGCCTGACACCAAATTTTAAGTCGAACTTCGACTTAGCTGAAGATGCCAAATTGCAGCTTAGTAAGGACACGTACGATGACGATCTCGACAATCT | |
| | ACTGGCACAAATTGGAGATCAGTATGCGGACTTATTTTTGGCTGCCAAAAACCTTAGCGATGCAATCCTCCTATCTGACATACTGAGAGTTAATACTGAGATTACCAAGGCGCCGTTAT | |
| | CCGCTTCAATGATCAAAAGGTACGATGAACATCACCAAGACTTGACACTTCTCAAGGCCCTAGTCCGTCAGCAACTGCCTGAGAAATATAAGGAAATATTCTTTGATCAGTCGAAAAAC | |
| | GGGTACGCAGGTTATATTGACGGCGGAGCGAGTCAAGAGGAATTCTACAAGTTTATCAAACCCATATTAGAGAAGATGGATGGGACGGAAGAGTTGCTTGTAAAACTCAATCGCGAAGA | |
| | TCTACTGCGAAAGCAGCGGACTTTCGACAACGGTAGCATTCCACATCAAATCCACTTAGGCGAATTGCATGCTATACTTAGAAGGCAGGAGGATTTTTATCCGTTCCTCAAAGACAATC | |
| | GTGAAAAGATTGAGAAAATCCTAACCTTTCGCATACCTTACTATGTGGGACCCCTGGCCCGAGGGAACTCTCGGTTCGCATGGATGACAAGAAAGTCCGAAGAAACGATTACTCCATGG | |
| | AATTTTGAGGAAGTTGTCGATAAAGGTGCGTCAGCTCAATCGTTCATCGAGAGGATGACCAACTTTGACAAGAATTTACCGAACGAAAAAGTATTGCCTAAGCACAGTTTACTTTACGA | |
| | GTATTTCACAGTGTACAATGAACTCACGAAAGTTAAGTATGTCACTGAGGGCATGCGTAAACCCGCCTTTCTAAGCGGAGAACAGAAGAAAGCAATAGTAGATCTGTTATTCAAGACCA | |
| | ACCGCAAAGTGACAGTTAAGCAATTGAAAGAGGACTACTTTAAGAAAATTGAATGCTTCGATTCTGTCGAGATCTCCGGGGTAGAAGATCGATTTAATGCGTCACTTGGTACGTATCAT | |
| | GACCTCCTAAAGATAATTAAAGATAAGGACTTCCTGGATAACGAAGAGAATGAAGATATCTTAGAAGATATAGTGTTGACTCTTACCCTCTTTGAAGATCGGGAAATGATTGAGGAAAG | |
| | ACTAAAAACATACGCTCACCTGTTCGACGATAAGGTTATGAAACAGTTAAAGAGGCGTCGCTATACGGGCTGGGGACGATTGTCGCGGAAACTTATCAACGGGATAAGAGACAAGCAAA | |
| | GTGGTAAAACTATTCTCGATTTTCTAAAGAGCGACGGCTTCGCCAATAGGAACTTTATGCAGCTGATCCATGATGACTCTTTAACCTTCAAAGAGGATATACAAAAGGCACAGGTTTCC | |
| | GGACAAGGGGACTCATTGCACGAACATATTGCGAATCTTGCTGGTTCGCCAGCCATCAAAAAGGGCATACTCCAGACAGTCAAAGTAGTGGATGAGCTAGTTAAGGTCATGGGACGTCA | |
| | CAAACCGGAAAACATTGTAATCGAGATGGCACGCGAAAATCAAACGACTCAGAAGGGGCAAAAAAACAGTCGAGAGCGGATGAAGAGAATAGAAGAGGGTATTAAAGAACTGGGCAGCC | |
| | AGATCTTAAAGGAGCATCCTGTGGAAAATACCCAATTGCAGAACGAGAAACTTTACCTCTATTACCTACAAAATGGAAGGGACATGTATGTTGATCAGGAACTGGACATAAACCGTTTA | |
| | TCTGATTACGACGTCGATCACATTGTACCCCAATCCTTTTTGAAGGACGATTCAATCGACAATAAAGTGCTTACACGCTCGGATAAGAACCGAGGGAAAAGTGACAATGTTCCAAGCGA | |
| | GGAAGTCGTAAAGAAAATGAAGAACTATTGGCGGCAGCTCCTAAATGCGAAACTGATAACGCAAAGAAAGTTCGATAACTTAACTAAAGCTGAGAGGGGTGGCTTGTCTGAACTTGACA | |
| | AGGCCGGATTTATTAAACGTCAGCTCGTGGAAACCCGCCAAATCACAAAGCATGTTGCACAGATACTAGATTCCCGAATGAATACGAAATACGACGAGAACGATAAGCTGATTCGGGAA | |
| | GTCAAAGTAATCACTTTAAAGTCAAAATTGGTGTCGGACTTCAGAAAGGATTTTCAATTCTATAAAGTTAGGGAGATAAATAACTACCACCATGCGCACGACGCTTATCTTAATGCCGT | |
| | CGTAGGGACCGCACTCATTAAGAAATACCCGAAGCTAGAAAGTGAGTTTGTGTATGGTGATTACAAAGTTTATGACGTCCGTAAGATGATCGCGAAAAGCGAACAGGAGATAGGCAAGG | |
| | CTACAGCCAAATACTTCTTTTATTCTAACATTATGAATTTCTTTAAGACGGAAATCACTCTGGCAAACGGAGAGATACGCAAACGACCTTTAATTGAAACCAATGGGGAGACAGGTGAA | |
| | ATCGTATGGGATAAGGGCCGGGACTTCGCGACGGTGAGAAAAGTTTTGTCCATGCCCCAAGTCAACATAGTAAAGAAAACTGAGGTGCAGACCGGAGGGTTTTCAAAGGAATCGATTCT | |
| | TCCAAAAAGGAATAGTGATAAGCTCATCGCTCGTAAAAAGGACTGGGACCCGAAAAAGTACGGTGGCTTCGATAGCCCTACAGTTGCCTATTCTGTCCTAGTAGTGGCAAAAGTTGAGA | |
| | AGGGAAAATCCAAGAAACTGAAGTCAGTCAAAGAATTATTGGGGATAACGATTATGGAGCGCTCGTCTTTTGAAAAGAACCCCATCGACTTCCTTGAGGCGAAAGGTTACAAGGAAGTA | |
| | AAAAAGGATCTCATAATTAAACTACCAAAGTATAGTCTGTTTGAGTTAGAAAATGGCCGAAAACGGATGTTGGCTAGCGCCGGAGAGCTTCAAAAGGGGAACGAACTCGCACTACCGTC | |
| | TAAATACGTGAATTTCCTGTATTTAGCGTCCCATTACGAGAAGTTGAAAGGTTCACCTGAAGATAACGAACAGAAGCAACTTTTTGTTGAGCAGCACAAACATTATCTCGACGAAATCA | |
| | TAGAGCAAATTTCGGAATTCAGTAAGAGAGTCATCCTAGCTGATGCCAATCTGGACAAAGTATTAAGCGCATACAACAAGCACAGGGATAAACCCATACGTGAGCAGGCGGAAAATATT | |
| | ATCCATTTGTTTACTCTTACCAACCTCGGCGCTCCAGCCGCATTCAAGTATTTTGACACAACGATAGATCGCAAACGATACACTTCTACCAAGGAGGTGCTAGACGCGACACTGATTCA | |
| | CCAATCCATCACGGGATTATATGAAACTCGGATAGATTTGTCACAGCTTGGGGGTGACGGATCCCCCAAGAAGAAGAGGAAAGTCTCGAGCGACTACAAAGACCATGACGGTGATTATA | |
| | AAGATCATGACATCGATTACAAGGATGACGATGACAAGGCTGCAGGA | |
| 4 | MDKKYSIGLDIGTNSVGWAVITDEYKVPSKKFKVLGNTDRHSIKKNLIGALLFDSGETAEATRLKRTARRRYTRRKNRICYLQEIFSNEMAKVDDSFFHRLEESFLVEEDKKHERHPIF | Cas9 wild type |
| | GNIVDEVAYHEKYPTIYHLRKKLVDSTDKADLRLIYLALAHMIKFRGHFLIEGDLNPDNSDVDKLFIQLVQTYNQLFEENPINASGVDAKAILSARLSKSRRLENLIAQLPGEKKNGLF | [Streptococcus |
| | GNLIALSLGLTPNFKSNFDLAEDAKLQLSKDTYDDDLDNLLAQIGDQYADLFLAAKNLSDAILLSDILRVNTEITKAPLSASMIKRYDEHHQDLTLLKALVRQQLPEKYKEIFFDQSKN | pyogenes] |
| | GYAGYIDGGASQEEFYKFIKPILEKMDGTEELLVKLNREDLLRKQRTFDNGSIPHQIHLGELHAILRRQEDFYPFLKDNREKIEKILTFRIPYYVGPLARGNSRFAWMTRKSEETITPW | |
| | NFEEVVDKGASAQSFIERMTNFDKNLPNEKVLPKHSLLYEYFTVYNELTKVKYVTEGMRKPAFLSGEQKKAIVDLLFKTNRKVTVKQLKEDYFKKIECFDSVEISGVEDRFNASLGTYH | |
| | DLLKIIKDKDFLDNEENEDILEDIVLTLTLFEDREMIEERLKTYAHLFDDKVMKQLKRRRYTGWGRLSRKLINGIRDKQSGKTILDFLKSDGFANRNFMQLIHDDSLTFKEDIQKAQVS | |
| | GQGDSLHEHIANLAGSPAIKKGILQTVKVVDELVKVMGRHKPENIVIEMARENQTTQKGQKNSRERMKRIEEGIKELGSQILKEHPVENTQLQNEKLYLYYLQNGRDMYVDQELDINRL | |
| | SDYDVDHIVPQSFLKDDSIDNKVLTRSDKNRGKSDNVPSEEVVKKMKNYWRQLLNAKLITQRKFDNLTKAERGGLSELDKAGFIKRQLVETRQITKHVAQILDSRMNTKYDENDKLIRE | |
| | VKVITLKSKLVSDFRKDFQFYKVREINNYHHAHDAYLNAVVGTALIKKYPKLESEFVYGDYKVYDVRKMIAKSEQEIGKATAKYFFYSNIMNFFKTEITLANGEIRKRPLIETNGETGE | |
| | IVWDKGRDFATVRKVLSMPQVNIVKKTEVQTGGFSKESILPKRNSDKLIARKKDWDPKKYGGFDSPTVAYSVLVVAKVEKGKSKKLKSVKELLGITIMERSSFEKNPIDFLEAKGYKEV | |
| | KKDLIIKLPKYSLFELENGRKRMLASAGELQKGNELALPSKYVNFLYLASHYEKLKGSPEDNEQKQLFVEQHKHYLDEIIEQISEFSKRVILADANLDKVLSAYNKHRDKPIREQAENI | |
| | IHLFTLTNLGAPAAFKYFDTTIDRKRYTSTKEVLDATLIHQSITGLYETRIDLSQLGGDGSPKKKRKVSSDYKDHDGDYKDHDIDYKDDDDKAAG | |
| 5 | ATGGATAAGAAATACTCAATAGGCTTAGATATCGGCACAAATAGCGTCGGATGGGCGGTGATCACTGATGAATATAAGGTTCCGTCTAAAAAGTTCAAGGTTCTGGGAAATACAGACCG | NC_002737.2 |
| | CCACAGTATCAAAAAAAATCTTATAGGGGCTCTTTTATTTGACAGTGGAGAGACAGCGGAAGCGACTCGTCTCAAACGGACAGCTCGTAGAAGGTATACACGTCGGAAGAATCGTATTT | [Streptococcus |
| | GTTATCTACAGGAGATTTTTTCAAATGAGATGGCGAAAGTAGATGATAGTTTCTTTCATCGACTTGAAGAGTCTTTTTTGGTGGAAGAAGACAAGAAGCATGAACGTCATCCTATTTTT | pyogenes M1GAS] |
| | GGAAATATAGTAGATGAAGTTGCTTATCATGAGAAATATCCAACTATCTATCATCTGCGAAAAAAATTGGTAGATTCTACTGATAAAGCGGATTTGCGCTTAATCTATTTGGCCTTAGC | |
| | GCATATGATTAAGTTTCGTGGTCATTTTTTGATTGAGGGAGATTTAAATCCTGATAATAGTGATGTGGACAAACTATTTATCCAGTTGGTACAAACCTACAATCAATTATTTGAAGAAA | |
| | ACCCTATTAACGCAAGTGGAGTAGATGCTAAAGCGATTCTTTCTGCACGATTGAGTAAATCAAGACGATTAGAAAATCTCATTGCTCAGCTCCCCGGTGAGAAGAAAAATGGCTTATTT | |
| | GGGAATCTCATTGCTTTGTCATTGGGTTTGACCCCTAATTTTAAATCAAATTTTGATTTGGCAGAAGATGCTAAATTACAGCTTTCAAAAGATACTTACGATGATGATTTAGATAATTT | |
| | ATTGGCGCAAATTGGAGATCAATATGCTGATTTGTTTTTGGCAGCTAAGAATTTATCAGATGCTATTTTACTTTCAGATATCCTAAGAGTAAATACTGAAATAACTAAGGCTCCCCTAT | |
| | CAGCTTCAATGATTAAACGCTACGATGAACATCATCAAGACTTGACTCTTTTAAAAGCTTTAGTTCGACAACAACTTCCAGAAAAGTATAAAGAAATCTTTTTTGATCAATCAAAAAAC | |
| | GGATATGCAGGTTATATTGATGGGGGAGCTAGCCAAGAAGAATTTTATAAATTTATCAAACCAATTTTAGAAAAAATGGATGGTACTGAGGAATTATTGGTGAAACTAAATCGTGAAGA | |
| | TTTGCTGCGCAAGCAACGGACCTTTGACAACGGCTCTATTCCCCATCAAATTCACTTGGGTGAGCTGCATGCTATTTTGAGAAGACAAGAAGACTTTTATCCATTTTTAAAAGACAATC | |
| | GTGAGAAGATTGAAAAAATCTTGACTTTTCGAATTCCTTATTATGTTGGTCCATTGGCGCGTGGCAATAGTCGTTTTGCATGGATGACTCGGAAGTCTGAAGAAACAATTACCCCATGG | |
| | AATTTTGAAGAAGTTGTCGATAAAGGTGCTTCAGCTCAATCATTTATTGAACGCATGACAAACTTTGATAAAAATCTTCCAAATGAAAAAGTACTACCAAAACATAGTTTGCTTTATGA | |
| | GTATTTTACGGTTTATAACGAATTGACAAAGGTCAAATATGTTACTGAAGGAATGCGAAAACCAGCATTTCTTTCAGGTGAACAGAAGAAAGCCATTGTTGATTTACTCTTCAAAACAA | |
| | ATCGAAAAGTAACCGTTAAGCAATTAAAAGAAGATTATTTCAAAAAAATAGAATGTTTTGATAGTGTTGAAATTTCAGGAGTTGAAGATAGATTTAATGCTTCATTAGGTACCTACCAT | |
| | GATTTGCTAAAAATTATTAAAGATAAAGATTTTTTGGATAATGAAGAAAATGAAGATATCTTAGAGGATATTGTTTTAACATTGACCTTATTTGAAGATAGGGAGATGATTGAGGAAAG | |
| | ACTTAAAACATATGCTCACCTCTTTGATGATAAGGTGATGAAACAGCTTAAACGTCGCCGTTATACTGGTTGGGGACGTTTGTCTCGAAAATTGATTAATGGTATTAGGGATAAGCAAT | |
| | CTGGCAAAACAATATTAGATTTTTTGAAATCAGATGGTTTTGCCAATCGCAATTTTATGCAGCTGATCCATGATGATAGTTTGACATTTAAAGAAGACATTCAAAAAGCACAAGTGTCT | |
| | GGACAAGGCGATAGTTTACATGAACATATTGCAAATTTAGCTGGTAGCCCTGCTATTAAAAAAGGTATTTTACAGACTGTAAAAGTTGTTGATGAATTGGTCAAAGTAATGGGGCGGCA | |
| | TAAGCCAGAAAATATCGTTATTGAAATGGCACGTGAAAATCAGACAACTCAAAAGGGCCAGAAAAATTCGCGAGAGCGTATGAAACGAATCGAAGAAGGTATCAAAGAATTAGGAAGTC | |
| | AGATTCTTAAAGAGCATCCTGTTGAAAATACTCAATTGCAAAATGAAAAGCTCTATCT [symbol] AAAATGGAAGAGACATGTATGTGGACCAAGAATTAGATATTAATCGTTTA | |
| | AGTGATTATGATGTCGATCACATTGTTCCACAAAGTTTCCTTAAAGACGATTCAATAGACAATAAGGTCTTAACGCGTTCTGATAAAAATCGTGGTAAATCGGATAACGTTCCAAGTGA | |
| | AGAAGTAGTCAAAAAGATGAAAAACTATTGGAGACAACTTCTAAACGCCAAGTTAATCACTCAACGTAAGTTTGATAATTTAACGAAAGCTGAACGTGGAGGTTTGAGTGAACTTGATA | |
| | AAGCTGGTTTTATCAAACGCCAATTGGTTGAAACTCGCCAAATCACTAAGCATGTGGCACAAATTTTGGATAGTCGCATGAATACTAAATACGATGAAAATGATAAACTTATTCGAGAG | |
| | GTTAAAGTGATTACCTTAAAATCTAAATTAGTTTCTGACTTCCGAAAAGATTTCCAATTCTATAAAGTACGTGAGATTAACAATTACCATCATGCCCATGATGCGTATCTAAATGCCGT | |
| | CGTTGGAACTGCTTTGATTAAGAAATATCCAAAACTTGAATCGGAGTTTGTCTATGGTGATTATAAAGTTTATGATGTTCGTAAAATGATTGCTAAGTCTGAGCAAGAAATAGGCAAAG | |
| | CAACCGCAAAATATTTCTTTTACTCTAATATCATGAACTTCTTCAAAACAGAAATTACACTTGCAAATGGAGAGATTCGCAAACGCCCTCTAATCGAAACTAATGGGGAAACTGGAGAA | |
| | ATTGTCTGGGATAAAGGGCGAGATTTTGCCACAGTGCGCAAAGTATTGTCCATGCCCCAAGTCAATATTGTCAAGAAAACAGAAGTACAGACAGGCGGATTCTCCAAGGAGTCAATTTT | |
| | ACCAAAAAGAAATTCGGACAAGCTTATTGCTCGTAAAAAAGACTGGGATCCAAAAAAATATGGTGGTTTTGATAGTCCAACGGTAGCTTATTCAGTCCTAGTGGTTGCTAAGGTGGAAA | |
| | AAGGGAAATCGAAGAAGTTAAAATCCGTTAAAGAGTTACTAGGGATCACAATTATGGAAAGAAGTTCCTTTGAAAAAAATCCGATTGACTTTTTAGAAGCTAAAGGATATAAGGAAGTT | |
| | AAAAAAGACTTAATCATTAAACTACCTAAATATAGTCTTTTTGAGTTAGAAAACGGTCGTAAACGGATGCTGGCTAGTGCCGGAGAATTACAAAAAGGAAATGAGCTGGCTCTGCCAAG | |
| | CAAATATGTGAATTTTTTATATTTAGCTAGTCATTATGAAAAGTTGAAGGGTAGTCCAGAAGATAACGAACAAAAACAATTGTTTGTGGAGCAGCATAAGCATTATTTAGATGAGATTA | |
| | TTGAGCAAATCAGTGAATTTTCTAAGCGTGTTATTTTAGCAGATGCCAATTTAGATAAAGTTCTTAGTGCATATAACAAACATAGAGACAAACCAATACGTGAACAAGCAGAAAATATT | |
| | ATTCATTTATTTACGTTGACGAATCTTGGAGCTCCCGCTGCTTTTAAATATTTTGATACAACAATTGATCGTAAACGATATACGTCTACAAAAGAAGTTTTAGATGCCACTCTTATCCA | |
| | TCAATCCATCACTGGTCTTTATGAAACACGCATTGATTTGAGTCAGCTAGGAGGTGACTGA | |
| 6 | MDKKYSIGLDIGTNSVGWAVITDEYKVPSKKFKVLGNTDRHSIKKNLIGALLFDSGETAEATRLKRTARRRYTRRKNRICYLQEIFSNEMAKVDDSFFHRLEESFLVEEDKKHERHPIF | Cas9 wild type |
| | GNIVDEVAYHEKYPTIYHLRKKLVDSTDKADLRLIYLALAHMIKFRGHFLIEGDLNPDNSDVDKLFIQLVQTYNQLFEENPINASGVDAKAILSARLSKSRRLENLIAQLPGEKKNGLF | Q99ZW2 |
| | GNLIALSLGLTPNFKSNFDLAEDAKLQLSKDTYDDDLDNLLAQIGDQYADLFLAAKNLSDAILLSDILRVNTEITKAPLSASMIKRYDEHHQDLTLLKALVRQQLPEKYKEIFFDQSKN | [Streptococcus |
| | GYAGYIDGGASQEEFYKFIKPILEKMDGTEELLVKLNREDLLRKQRTFDNGSIPHQIHLGELHAILRRQEDFYPFLKDNREKIEKILTFRIPYYVGPLARGNSRFAWMTRKSEETITPW | pyogenes] |
| | NFEEVVDKGASAQSFIERMTNFDKNLPNEKVLPKHSLLYEYFTVYNELTKVKYVTEGMRKPAFLSGEQKKAIVDLLFKTNRKVTVKQLKEDYFKKIECFDSVEISGVEDRFNASLGTYH | |
| | DLLKIIKDKDFLDNEENEDILEDIVLTLTLFEDREMIEERLKTYAHLFDDKVMKQLKRRRYTGWGRLSRKLINGIRDKQSGKTILDFLKSDGFANRNFMQLIHDDSLTFKEDIQKAQVS | |
| | GQGDSLHEHIANLAGSPAIKKGILQTVKVVDELVKVMGRHKPENIVIEMARENQTTQKGQKNSRERMKRIEEGIKELGSQILKEHPVENTQLQNEKLYLYYLQNGRDMYVDQELDINRL | |
| | SDYDVDHIVPQSFLKDDSIDNKVLTRSDKNRGKSDNVPSEEVVKKMKNYWRQLLNAKLITQRKFDNLTKAERGGLSELDKAGFIKRQLVETRQITKHVAQILDSRMNTKYDENDKLIRE | |
| | VKVITLKSKLVSDFRKDFQFYKVREINNYHHAHDAYLNAVVGTALIKKYPKLESEFVYGDYKVYDVRKMIAKSEQEIGKATAKYFFYSNIMNFFKTEITLANGEIRKRPLIETNGETGE | |
| | IVWDKGRDFATVRKVLSMPQVNIVKKTEVQTGGFSKESILPKRNSDKLIARKKDWDPKKYGGFDSPTVAYSVLVVAKVEKGKSKKLKSVKELLGITIMERSSFEKNPIDFLEAKGYKEV | |
| | KKDLIIKLPKYSLFELENGRKRMLASAGELQKGNELALPSKYVNFLYLASHYEKLKGSPEDNEQKQLFVEQHKHYLDEIIEQISEFSKRVILADANLDKVLSAYNKHRDKPIREQAENI | |
| | IHLFTLTNLGAPAAFKYFDTTIDRKRYTSTKEVLDATLIHQSITGLYETRIDLSQLGGD | |
| 7 | MDKKYSIGLAIGTNSVGWAVITDEYKVPSKKFKVLGNTDRHSIKKNLIGALLFDSGETAEATRLKRTARRRYTRRKNRICYLQEIFSNEMAKVDDSFFHRLEESFLVEEDKKHERHPIF | Cas9 nickase |
| | GNIVDEVAYHEKYPTIYHLRKKLVDSTDKADLRLIYLALAHMIKFRGHFLIEGDLNPDNSDVDKLFIQLVQTYNQLFEENPINASGVDAKAILSARLSKSRRLENLIAQLPGEKKNGLF | (D10A) |
| | GNLIALSLGLTPNFKSNFDLAEDAKLQLSKDTYDDDLDNLLAQIGDQYADLFLAAKNLSDAILLSDILRVNTEITKAPLSASMIKRYDEHHQDLTLLKALVRQQLPEKYKEIFFDQSKN | Q99ZW2 |
| | GYAGYIDGGASQEEFYKFIKPILEKMDGTEELLVKLNREDLLRKQRTFDNGSIPHQIHLGELHAILRRQEDFYPFLKDNREKIEKILTFRIPYYVGPLARGNSRFAWMTRKSEETITPW | [Streptococcus |
| | NFEEVVDKGASAQSFIERMTNFDKNLPNEKVLPKHSLLYEYFTVYNELTKVKYVTEGMRKPAFLSGEQKKAIVDLLFKTNRKVTVKQLKEDYFKKIECFDSVEISGVEDRFNASLGTYH | pyogenes] |
| | DLLKIIKDKDFLDNEENEDILEDIVLTLTLFEDREMIEERLKTYAHLFDDKVMKQLKRRRYTGWGRLSRKLINGIRDKQSGKTILDFLKSDGFANRNFMQLIHDDSLTFKEDIQKAQVS | |
| | GQGDSLHEHIANLAGSPAIKKGILQTVKVVDELVKVMGRHKPENIVIEMARENQTTQKGQKNSRERMKRIEEGIKELGSQILKEHPVENTQLQNEKLYLYYLQNGRDMYVDQELDINRL | |
| | SDYDVDHIVPQSFLKDDSIDNKVLTRSDKNRGKSDNVPSEEVVKKMKNYWRQLLNAKLITQRKFDNLTKAERGGLSELDKAGFIKRQLVETRQITKHVAQILDSRMNTKYDENDKLIRE | |
| | VKVITLKSKLVSDFRKDFQFYKVREINNYHHAHDAYLNAVVGTALIKKYPKLESEFVYGDYKVYDVRKMIAKSEQEIGKATAKYFFYSNIMNFFKTEITLANGEIRKRPLIETNGETGE | |
| | IVWDKGRDFATVRKVLSMPQVNIVKKTEVQTGGFSKESILPKRNSDKLIARKKDWDPKKYGGFDSPTVAYSVLVVAKVEKGKSKKLKSVKELLGITIMERSSFEKNPIDFLEAKGYKEV | |
| | KKDLIIKLPKYSLFELENGRKRMLASAGELQKGNELALPSKYVNFLYLASHYEKLKGSPEDNEQKQLFVEQHKHYLDEIIEQISEFSKRVILADANLDKVLSAYNKHRDKPIREQAENI | |
| | IHLFTLTNLGAPAAFKYFDTTIDRKRYTSTKEVLDATLIHQSITGLYETRIDLSQLGGD | |
| 8 | MDKKYSIGLDIGTNSVGWAVITDEYKVPSKKFKVLGNTDRHSIKKNLIGALLFDSGETAEATRLKRTARRRYTRRKNRICYLQEIFSNEMAKVDDSFFHRLEESFLVEEDKKHERHPIF | Cas9 nickase |
| | GNIVDEVAYHEKYPTIYHLRKKLVDSTDKADLRLIYLALAHMIKFRGHFLIEGDLNPDNSDVDKLFIQLVQTYNQLFEENPINASGVDAKAILSARLSKSRRLENLIAQLPGEKKNGLF | (H810A) Q99ZW2 |
| | GNLIALSLGLTPNFKSNFDLAEDAKLQLSKDTYDDDLDNLLAQIGDQYADLFLAAKNLSDAILLSDILRVNTEITKAPLSASMIKRYDEHHQDLTLLKALVRQQLPEKYKEIFFDQSKN | [Streptococcus |
| | GYAGYIDGGASQEEFYKFIKPILEKMDGTEELLVKLNREDLLRKQRTFDNGSIPHQIHLGELHAILRRQEDFYPFLKDNREKIEKILTFRIPYYVGPLARGNSRFAWMTRKSEETITPW | pyogenes] |
| | NFEEVVDKGASAQSFIERMTNFDKNLPNEKVLPKHSLLYEYFTVYNELTKVKYVTEGMRKPAFLSGEQKKAIVDLLFKTNRKVTVKQLKEDYFKKIECFDSVEISGVEDRFNASLGTYH | |
| | DLLKIIKDKDFLDNEENEDILEDIVLTLTLFEDREMIEERLKTYAHLFDDKVMKQLKRRRYTGWGRLSRKLINGIRDKQSGKTILDFLKSDGFANRNFMQLIHDDSLTFKEDIQKAQVS | |
| | GQGDSLHEHIANLAGSPAIKKGILQTVKVVDELVKVMGRHKPENIVIEMARENQTTQKGQKNSRERMKRIEEGIKELGSQILKEHPVENTQLQNEKLYLYYLQNGRDMYVDQELDINRL | |
| | SDYDVDAIVPQSFLKDDSIDNKVLTRSDKNRGKSDNVPSEEVVKKMKNYWRQLLNAKLITQRKFDNLTKAERGGLSELDKAGFIKRQLVETRQITKHVAQILDSRMNTKYDENDKLIRE | |
| | VKVITLKSKLVSDFRKDFQFYKVREINNYHHAHDAYLNAVVGTALIKKYPKLESEFVYGDYKVYDVRKMIAKSEQEIGKATAKYFFYSNIMNFFKTEITLANGEIRKRPLIETNGETGE | |
| | IVWDKGRDFATVRKVLSMPQVNIVKKTEVQTGGFSKESILPKRNSDKLIARKKDWDPKKYGGFDSPTVAYSVLVVAKVEKGKSKKLKSVKELLGITIMERSSFEKNPIDFLEAKGYKEV | |
| | KKDLIIKLPKYSLFELENGRKRMLASAGELQKGNELALPSKYVNFLYLASHYEKLKGSPEDNEQKQLFVEQHKHYLDEIIEQISEFSKRVILADANLDKVLSAYNKHRDKPIREQAENI | |
| | IHLFTLTNLGAPAAFKYFDTTIDRKRYTSTKEVLDATLIHQSITGLYETRIDLSQLGGD | |
| 9 | MDKKYSIGLAIGTNSVGWAVITDEYKVPSKKFKVLGNTDRHSIKKNLIGALLFDSGETAEATRLKRTARRRYTRRKNRICYLQEIFSNEMAKVDDSFFHRLEESFLVEEDKKHERHPIF | dead Cas9 (D10A |
| | GNIVDEVAYHEKYPTIYHLRKKLVDSTDKADLRLIYLALAHMIKFRGHFLIEGDLNPDNSDVDKLFIQLVQTYNQLFEENPINASGVDAKAILSARLSKSRRLENLIAQLPGEKKNGLF | H810A) |
| | GNLIALSLGLTPNFKSNFDLAEDAKLQLSKDTYDDDLDNLLAQIGDQYADLFLAAKNLSDAILLSDILRVNTEITKAPLSASMIKRYDEHHQDLTLLKALVRQQLPEKYKEIFFDQSKN | Q99ZW2 |
| | GYAGYIDGGASQEEFYKFIKPILEKMDGTEELLVKLNREDLLRKQRTFDNGSIPHQIHLGELHAILRRQEDFYPFLKDNREKIEKILTFRIPYYVGPLARGNSRFAWMTRKSEETITPW | [Streptococcus |
| | NFEEVVDKGASAQSFIERMTNFDKNLPNEKVLPKHSLLYEYFTVYNELTKVKYVTEGMRKPAFLSGEQKKAIVDLLFKTNRKVTVKQLKEDYFKKIECFDSVEISGVEDRFNASLGTYH | pyogenes] |
| | DLLKIIKDKDFLDNEENEDILEDIVLTLTLFEDREMIEERLKTYAHLFDDKVMKQLKRRRYTGWGRLSRKLINGIRDKQSGKTILDFLKSDGFANRNFMQLIHDDSLTFKEDIQKAQVS | |
| | GQGDSLHEHIANLAGSPAIKKGILQTVKVVDELVKVMGRHKPENIVIEMARENQTTQKGQKNSRERMKRIEEGIKELGSQILKEHPVENTQLQNEKLYLYYLQNGRDMYVDQELDINRL | |
| | SDYDVDAIVPQSFLKDDSIDNKVLTRSDKNRGKSDNVPSEEVVKKMKNYWRQLLNAKLITQRKFDNLTKAERGGLSELDKAGFIKRQLVETRQITKHVAQILDSRMNTKYDENDKLIRE | |
| | VKVITLKSKLVSDFRKDFQFYKVREINNYHHAHDAYLNAVVGTALIKKYPKLESEFVYGDYKVYDVRKMIAKSEQEIGKATAKYFFYSNIMNFFKTEITLANGEIRKRPLIETNGETGE | |
| | IVWDKGRDFATVRKVLSMPQVNIVKKTEVQTGGFSKESILPKRNSDKLIARKKDWDPKKYGGFDSPTVAYSVLVVAKVEKGKSKKLKSVKELLGITIMERSSFEKNPIDFLEAKGYKEV | |
| | KKDLIIKLPKYSLFELENGRKRMLASAGELQKGNELALPSKYVNFLYLASHYEKLKGSPEDNEQKQLFVEQHKHYLDEIIEQISEFSKRVILADANLDKVLSAYNKHRDKPIREQAENI | |
| | IHLFTLTNLGAPAAFKYFDTTIDRKRYTSTKEVLDATLIHQSITGLYETRIDLSQLGGD | |
| 10 | KRNYILGLDIGITSVGYGIIDYETRDVIDAGVRLFKEANVENNEGRRSKRGARRLKRRRRHRIQRVKKLLFDYNLLTDHSELSGINPYEARVKGLSQKLSEEEFSAALLHLAKRRGVHN | Staphylococcus |
| | VNEVEEDTGNELSTKEQISRNSKALEEKYVAELQLERLKKDGEVRGSINRFKTSDYVKEAKQLLKVQKAYHQLDQSFIDTYIDLLETRRTYYEGPGEGSPFGWKDIKEWYEMLMGHCTY | aureus Cas9 |
| | FPEELRSVKYAYNADLYNALNDLNNLVITRDENEKLEYYEKFQIIENVFKQKKKPTLKQIAKEILVNEEDIKGYRVTSTGKPEFTNLKVYHDIKDITARKEIIENAELLDQIAKILTIY | |
| | QSSEDIQEELTNLNSELTQEEIEQISNLKGYTGTHNLSLKAINLILDELWHTNDNQIAIFNRLKLVPKKVDLSQQKEIPTTLVDDFILSPVVKRSFIQSIKVINAIIKKYGLPNDIIIE | |
| | LAREKNSKDAQKMINEMQKRNRQTNERIEEIIRTTGKENAKYLIEKIKLHDMQEGKCLYSLEAIPLEDLLNNPFNYEVDHIIPRSVSFDNSFNNKVLVKQEENSKKGNRTPFQYLSSSD | |
| | SKISYETFKKHILNLAKGKGRISKTKKEYLLEERDINRFSVQKDFINRNLVDTRYATRGLMNLLRSYFRVNNLDVKVKSINGGFTSFLRRKWKFKKERNKGYKHHAEDALIIANADFIF | |
| | KEWKKLDKAKKVMENQMFEEKQAESMPEIETEQEYKEIFITPHQIKHIKDFKDYKYSHRVDKKPNRELINDTLYSTRKDDKGNTLIVNNLNGLYDKDNDKLKKLINKSPEKLLMYHHDP | |
| | QTYQKLKLIMEQYGDEKNPLYKYYEETGNYLTKYSKKDNGPVIKKIKYYGNKLNAHLDITDDYPNSRNKVVKLSLKPYRFDVYLDNGVYKFVTVKNLDVIKKENYYEVNSKCYEEAKKL | |
| | KKISNQAEFIASFYNNDLIKINGELYRVIGVNNDLLNRIEVNMIDITYREYLENMNDKRPPRIIKTIASKTQSIKKYSTDILGNLYEVKSKKHPQIIKKG | |
| 11 | MKYKIGLDIGITSIGWAVINLDIPRIEDLGVRIFDRAENPKTGESLALPRRLARSARRRLRRRKHRLERIRRLFVREGILTKEELNKLFEKKHEIDVWQLRVEALDRKLNNDELARILL | Geobacillus |
| | HLAKRRGFRSNRKSERTNKENSTMLKHIEENQSILSSYRTVAEMVVKDPKFSLHKRNKEDNYTNTVARDDLEREIKLIFAKQREYGNIVCTEAFEHEYISIWASQRPFASKDDIEKKVG | thermodenitrificans |
| | FCTFEPKEKRAPKATYTFQSFTVWEHINKLRLVSPGGIRALTDDERRLIYKQAFHKNKITFHDVRTLLNLPDDTRFKGLLYDRNTTLKENEKVRFLELGAYHKIRKAIDSVYGKGAAKS | Cas9 |
| | FRPIDFDTFGYALTMFKDDTDIRSYLRNEYEQNGKRMENLADKVYDEELIEELLNLSFSKFGHLSLKALRNILPYMEQGEVYSTACERAGYTFTGPKKKQKTVLLPNIPPIANPVVMRA | |
| | LTQARKVVNAIIKKYGSPVSIHIELARELSQSFDERRKMQKEQEGNRKKNETAIRQLVEYGLTLNPTGLDIVKFKLWSEQNGKCAYSLQPIEIERLLEPGYTEVDHVIPYSRSLDDSYT | |
| | NKVLVLTKENREKGNRTPAEYLGLGSERWQQFETFVLTNKQFSKKKRDRLLRLHYDENEENEFKNRNLNDTRYISRFLANFIREHLKFADSDDKQKVYTVNGRITAHLRSRWNFNKNRE | |
| | ESNLHHAVDAAIVACTTPSDIARVTAFYQRREQNKELSKKTDPQFPQPWPHFADELQARLSKNPKESIKALNLGNYDNEKLESLQPVFVSRMPKRSITGAAHQETLRRYIGIDERSGKI | |
| | QTVVKKKLSEIQLDKTGHFPMYGKESDPRTYEAIRQRLLEHNNDPKKAFQEPLYKPKKNGELGPIIRTIKIIDTTNQVIPLNDGKTVAYNSNIVRVDVFEKDGKYYCVPIYTIDMMKGI | |
| | LPNKAIEPNKPYSEWKEMTEDYTFRFSLYPNDLIRIEFPREKTIKTAVGEEIKIKDLFAYYQTIDSSNGGLSLVSHDNNFSLRSIGSRTLKRFEKYQVDVLGNIYKVRGEKRVGVASSS | |
| | HSKAGETIRPL | |
| | Cas9 circular permutants | |
| 12 | DYKVYDVRKMIAKSEQEIGKATAKYFFYSNIMNFFKTEITLANGEIRKRPLIETNGETGEIVWDKGRDFATVRKVLSMPQVNIVKKTEVQTGGFSKESILPKRNSDKLIARKKDWDPKK | Cas9 variant |
| | YGGFDSPTVAYSVLVVAKVEKGKSKKLKSVKELLGITIMERSSFEKNPIDFLEAKGYKEVKKDLIIKLPKYSLFELENGRKRMLASAGELQKGNELALPSKYVNFLYLASHYEKLKGSP | CP1012 |
| | EDNEQKQLFVEQHKHYLDEIIEQISEFSKRVILADANLDKVLSAYNKHRDKPIREQAENIIHLFTLTNLGAPAAFKYFDTTIDRKRYTSTKEVLDATLIHQSITGLYETRIDLSQLGGD | [Synthetic] |
| | GGSGGSGGSGGSGGSGGSGGDKKYSIGLAIGTNSVGWAVITDEYKVPSKKFKVLGNTDRHSIKKNLIGALLFDSGETAEATRLKRTARRRYTRRKNRICYLQEIFSNEMAKVDDSFFHR | |
| | LEESFLVEEDKKHERHPIFGNIVDEVAYHEKYPTIYHLRKKLVDSTDKADLRLIYLALAHMIKFRGHFLIEGDLNPDNSDVDKLFIQLVQTYNQLFEENPINASGVDAKAILSARLSKS | |
| | RRLENLIAQLPGEKKNGLFGNLIALSLGLTPNFKSNFDLAEDAKLQLSKDTYDDDLDNLLAQIGDQYADLFLAAKNLSDAILLSDILRVNTEITKAPLSASMIKRYDEHHQDLTLLKAL | |
| | VRQQLPEKYKEIFFDQSKNGYAGYIDGGASQEEFYKFIKPILEKMDGTEELLVKLNREDLLRKQRTFDNGSIPHQIHLGELHAILRRQEDFYPFLKDNREKIEKILTFRIPYYVGPLAR | |
| | GNSRFAWMTRKSEETITPWNFEEVVDKGASAQSFIERMTNFDKNLPNEKVLPKHSLLYEYFTVYNELTKVKYVTEGMRKPAFLSGEQKKAIVDLLFKTNRKVTVKQLKEDYFKKIECFD | |
| | SVEISGVEDRFNASLGTYHDLLKIIKDKDFLDNEENEDILEDIVLTLTLFEDREMIEERLKTYAHLFDDKVMKQLKRRRYTGWGRLSRKLINGIRDKQSGKTILDFLKSDGFANRNFMQ | |
| | LIHDDSLTFKEDIQKAQVSGQGDSLHEHIANLAGSPAIKKGILQTVKVVDELVKVMGRHKPENIVIEMARENQTTQKGQKNSRERMKRIEEGIKELGSQILKEHPVENTQLQNEKLYLY | |
| | YLQNGRDMYVDQELDINRLSDYDVDHIVPQSFLKDDSIDNKVLTRSDKNRGKSDNVPSEEVVKKMKNYWRQLLNAKLITQRKFDNLTKAERGGLSELDKAGFIKRQLVETRQITKHVAQ | |
| | ILDSRMNTKYDENDKLIREVKVITLKSKLVSDFRKDFQFYKVREINNYHHAHDAYLNAVVGTALIKKYPKLESEFVYG | |
| 13 | EIGKATAKYFFYSNIMNFFKTEITLANGEIRKRPLIETNGETGEIVWDKGRDFATVRKVLSMPQVNIVKKTEVQTGGFSKESILPKRNSDKLIARKKDWDPKKYGGFDSPTVAYSVLVV | Cas9 varient |
| | AKVEKGKSKKLKSVKELLGITIMERSSFEKNPIDFLEAKGYKEVKKDLIIKLPKYSLFELENGRKRMLASAGELQKGNELALPSKYVNFLYLASHYEKLKGSPEDNEQKQLFVEQHKHY | CP1028 |
| | LDEIIEQISEFSKRVILADANLDKVLSAYNKHRDKPIREQAENIIHLFTLTNLGAPAAFKYFDTTIDRKRYTSTKEVLDATLIHQSITGLYETRIDLSQLGGDGGSGGSGGSGGSGGSG | [Synthetic] |
| | GSGGMDKKYSIGLAIGTNSVGWAVITDEYKVPSKKFKVLGNTDRHSIKKNLIGALLFDSGETAEATRLKRTARRRYTRRKNRICYLQEIFSNEMAKVDDSFFHRLEESFLVEEDKKHER | |
| | HPIFGNIVDEVAYHEKYPTIYHLRKKLVDSTDKADLRLIYLALAHMIKFRGHFLIEGDLNPDNSDVDKLFIQLVQTYNQLFEENPINASGVDAKAILSARLSKSRRLENLIAQLPGEKK | |
| | NGLFGNLIALSLGLTPNFKSNFDLAEDAKLQLSKDTYDDDLDNLLAQIGDQYADLFLAAKNLSDAILLSDILRVNTEITKAPLSASMIKRYDEHHQDLTLLKALVRQQLPEKYKEIFFD | |
| | QSKNGYAGYIDGGASQEEFYKFIKPILEKMDGTEELLVKLNREDLLRKQRTFDNGSIPHQIHLGELHAILRRQEDFYPFLKDNREKIEKILTFRIPYYVGPLARGNSRFAWMTRKSEET | |
| | ITPWNFEEVVDKGASAQSFIERMTNFDKNLPNEKVLPKHSLLYEYFTVYNELTKVKYVTEGMRKPAFLSGEQKKAIVDLLFKTNRKVTVKQLKEDYFKKIECFDSVEISGVEDRFNASL | |
| | GTYHDLLKIIKDKDFLDNEENEDILEDIVLTLTLFEDREMIEERLKTYAHLFDDKVMKQLKRRRYTGWGRLSRKLINGIRDKQSGKTILDFLKSDGFANRNFMQLIHDDSLTFKEDIQK | |
| | AQVSGQGDSLHEHIANLAGSPAIKKGILQTVKVVDELVKVMGRHKPENIVIEMARENQTTQKGQKNSRERMKRIEEGIKELGSQILKEHPVENTQLQNEKLYLYYLQNGRDMYVDQELD | |
| | INRLSDYDVDHIVPQSFLKDDSIDNKVLTRSDKNRGKSDNVPSEEVVKKMKNYWRQLLNAKLITQRKFDNLTKAERGGLSELDKAGFIKRQLVETRQITKHVAQILDSRMNTKYDENDK | |
| | LIREVKVITLKSKLVSDFRKDFQFYKVREINNYHHAHDAYLNAVVGTALIKKYPKLESEFVYGDYKVYDVRKMIAKSEQ | |
| 14 | NIMNFFKTEITLANGEIRKRPLIETNGETGEIVWDKGRDFATVRKVLSMPQVNIVKKTEVQTGGFSKESILPKRNSDKLIARKKDWDPKKYGGFDSPTVAYSVLVVAKVEKGKSKKLKS | Cas9 variant |
| | VKELLGITIMERSSFEKNPIDFLEAKGYKEVKKDLIIKLPKYSLFELENGRKRMLASAGELQKGNELALPSKYVNFLYLASHYEKLKGSPEDNEQKQLFVEQHKHYLDEIIEQISEFSK | CP1041 |
| | RVILADANLDKVLSAYNKHRDKPIREQAENIIHLFTLTNLGAPAAFKYFDTTIDRKRYTSTKEVLDATLIHQSITGLYETRIDLSQLGGDGGSGGSGGSGGSGGSGGSGGDKKYSIGLA | [Synthetic] |
| | IGTNSVGWAVITDEYKVPSKKFKVLGNTDRHSIKKNLIGALLFDSGETAEATRLKRTARRRYTRRKNRICYLQEIFSNEMAKVDDSFFHRLEESFLVEEDKKHERHPIFGNIVDEVAYH | |
| | EKYPTIYHLRKKLVDSTDKADLRLIYLALAHMIKFRGHFLIEGDLNPDNSDVDKLFIQLVQTYNQLFEENPINASGVDAKAILSARLSKSRRLENLIAQLPGEKKNGLFGNLIALSLGL | |
| | TPNFKSNFDLAEDAKLQLSKDTYDDDLDNLLAQIGDQYADLFLAAKNLSDAILLSDILRVNTEITKAPLSASMIKRYDEHHQDLTLLKALVRQQLPEKYKEIFFDQSKNGYAGYIDGGA | |
| | SQEEFYKFIKPILEKMDGTEELLVKLNREDLLRKQRTFDNGSIPHQIHLGELHAILRRQEDFYPFLKDNREKIEKILTFRIPYYVGPLARGNSRFAWMTRKSEETITPWNFEEVVDKGA | |
| | SAQSFIERMTNFDKNLPNEKVLPKHSLLYEYFTVYNELTKVKYVTEGMRKPAFLSGEQKKAIVDLLFKTNRKVTVKQLKEDYFKKIECFDSVEISGVEDRFNASLGTYHDLLKIIKDKD | |
| | FLDNEENEDILEDIVLTLTLFEDREMIEERLKTYAHLFDDKVMKQLKRRRYTGWGRLSRKLINGIRDKQSGKTILDFLKSDGFANRNFMQLIHDDSLTFKEDIQKAQVSGQGDSLHEHI | |
| | ANLAGSPAIKKGILQTVKVVDELVKVMGRHKPENIVIEMARENQTTQKGQKNSRERMKRIEEGIKELGSQILKEHPVENTQLQNEKLYLYYLQNGRDMYVDQELDINRLSDYDVDHIVP | |
| | QSFLKDDSIDNKVLTRSDKNRGKSDNVPSEEVVKKMKNYWRQLLNAKLITQRKFDNLTKAERGGLSELDKAGFIKRQLVETRQITKHVAQILDSRMNTKYDENDKLIREVKVITLKSKL | |
| | VSDFRKDFQFYKVREINNYHHAHDAYLNAVVGTALIKKYPKLESEFVYGDYKVYDVRKMIAKSEQEIGKATAKYFFYS | |
| 15 | PEDNEQKQLFVEQHKHYLDEIIEQISEFSKRVILADANLDKVLSAYNKHRDKPIREQAENIIHLFTLTNLGAPAAFKYFDTTIDRKRYTSTKEVLDATLIHQSITGLYETRIDLSQLGG | Cas9 variant |
| | DGGSGGSGGSGGSGGSGGSGGMDKKYSIGLAIGTNSVGWAVITDEYKVPSKKFKVLGNTDRHSIKKNLIGALLFDSGETAEATRLKRTARRRYTRRKNRICYLQEIFSNEMAKVDDSFF | CP1249 |
| | HRLEESFLVEEDKKHERHPIFGNIVDEVAYHEKYPTIYHLRKKLVDSTDKADLRLIYLALAHMIKFRGHFLIEGDLNPDNSDVDKLFIQLVQTYNQLFEENPINASGVDAKAILSARLS | [Synthetic] |
| | KSRRLENLIAQLPGEKKNGLFGNLIALSLGLTPNFKSNFDLAEDAKLQLSKDTYDDDLDNLLAQIGDQYADLFLAAKNLSDAILLSDILRVNTEITKAPLSASMIKRYDEHHQDLTLLK | |
| | ALVRQQLPEKYKEIFFDQSKNGYAGYIDGGASQEEFYKFIKPILEKMDGTEELLVKLNREDLLRKORTFDNGSIPHQIHLGELHAILRRQEDFYPFLKDNREKIEKILTFRIPYYVGPL | |
| | ARGNSRFAWMTRKSEETITPWNFEEVVDKGASAQSFIERMTNFDKNLPNEKVLPKHSLLYEYFTVYNELTKVKYVTEGMRKPAFLSGEQKKAIVDLLFKTNRKVTVKQLKEDYFKKIEC | |
| | FDSVEISGVEDRFNASLGTYHDLLKIIKDKDFLDNEENEDILEDIVLTLTLFEDREMIEERLKTYAHLFDDKVMKQLKRRRYTGWGRLSRKLINGIRDKQSGKTILDFLKSDGFANRNF | |
| | MQLIHDDSLTFKEDIQKAQVSGQGDSLHEHIANLAGSPAIKKGILQTVKVVDELVKVMGRHKPENIVIEMARENQTTQKGQKNSRERMKRIEEGIKELGSQILKEHPVENTQLQNEKLY | |
| | LYYLQNGRDMYVDQELDINRLSDYDVDHIVPQSFLKDDSIDNKVLTRSDKNRGKSDNVPSEEVVKKMKNYWRQLLNAKLITQRKFDNLTKAERGGLSELDKAGFIKRQLVETRQITKHV | |
| | AQILDSRMNTKYDENDKLIREVKVITLKSKLVSDFRKDFQFYKVREINNYHHAHDAYLNAVVGTALIKKYPKLESEFVYGDYKVYDVRKMIAKSEQEIGKATAKYFFYSNIMNFFKTEI | |
| | TLANGEIRKRPLIETNGETGEIVWDKGRDFATVRKVLSMPQVNIVKKTEVQTGGFSKESILPKRNSDKLIARKKDWDPKKYGGFDSPTVAYSVLVVAKVEKGKSKKLKSVKELLGITIM | |
| | ERSSFEKNPIDFLEAKGYKEVKKDLIIKLPKYSLFELENGRKRMLASAGELQKGNELALPSKYVNFLYLASHYEKLKGS | |
| 16 | KPIREQAENIIHLFTLTNLGAPAAFKYFDTTIDRKRYTSTKEVLDATLIHQSITGLYETRIDLSQLGGDGGSGGSGGSGGSGGSGGSGGDKKYSIGLAIGTNSVGWAVITDEYKVPSKK | Cas9 varient |
| | FKVLGNTDRHSIKKNLIGALLFDSGETAEATRLKRTARRRYTRRKNRICYLQEIFSNEMAKVDDSFFHRLEESFLVEEDKKHERHPIFGNIVDEVAYHEKYPTIYHLRKKLVDSTDKAD | CP1300 |
| | LRLIYLALAHMIKFRGHFLIEGDLNPDNSDVDKLFIQLVQTYNQLFEENPINASGVDAKAILSARLSKSRRLENLIAQLPGEKKNGLFGNLIALSLGLTPNFKSNFDLAEDAKLQLSKD | [Synthetic] |
| | TYDDDLDNLLAQIGDQYADLFLAAKNLSDAILLSDILRVNTEITKAPLSASMIKRYDEHHQDLTLLKALVRQQLPEKYKEIFFDQSKNGYAGYIDGGASQEEFYKFIKPILEKMDGTEE | |
| | LLVKLNREDLLRKQRTFDNGSIPHQIHLGELHAILRRQEDFYPFLKDNREKIEKILTFRIPYYVGPLARGNSRFAWMTRKSEETITPWNFEEVVDKGASAQSFIERMTNFDKNLPNEKV | |
| | LPKHSLLYEYFTVYNELTKVKYVTEGMRKPAFLSGEQKKAIVDLLFKTNRKVTVKQLKEDYFKKIECFDSVEISGVEDRFNASLGTYHDLLKIIKDKDFLDNEENEDILEDIVLTLTLF | |
| | EDREMIEERLKTYAHLFDDKVMKQLKRRRYTGWGRLSRKLINGIRDKQSGKTILDFLKSDGFANRNFMQLIHDDSLTFKEDIQKAQVSGQGDSLHEHIANLAGSPAIKKGILQTVKVVD | |
| | ELVKVMGRHKPENIVIEMARENQTTQKGQKNSRERMKRIEEGIKELGSQILKEHPVENTQLQNEKLYLYYLQNGRDMYVDQELDINRLSDYDVDHIVPQSFLKDDSIDNKVLTRSDKNR | |
| | GKSDNVPSEEVVKKMKNYWRQLLNAKLITQRKFDNLTKAERGGLSELDKAGFIKRQLVETRQITKHVAQILDSRMNTKYDENDKLIREVKVITLKSKLVSDFRKDFQFYKVREINNYHH | |
| | AHDAYLNAVVGTALIKKYPKLESEFVYGDYKVYDVRKMIAKSEQEIGKATAKYFFYSNIMNFFKTEITLANGEIRKRPLIETNGETGEIVWDKGRDFATVRKVLSMPQVNIVKKTEVQT | |
| | GGFSKESILPKRNSDKLIARKKDWDPKKYGGFDSPTVAYSVLVVAKVEKGKSKKLKSVKELLGITIMERSSFEKNPIDFLEAKGYKEVKKDLIIKLPKYSLFELENGRKRMLASAGELQ | |
| | KGNELALPSKYVNFLYLASHYEKLKGSPEDNEQKQLFVEQHKHYLDEIIEQISEFSKRVILADANLDKVLSAYNKHRD | |
| 17 | DYKVYDVRKMIAKSEQEIGKATAKYFFYSNIMNFFKTEITLANGEIRKRPLIETNGETGEIVWDKGRDFATVRKVLSMPQVNIVKKTEVQTGGFSKESILPKRNSDKLIARKKDWDPKK | Cas9 varient |
| | YGGFDSPTVAYSVLVVAKVEKGKSKKLKSVKELLGITIMERSSFEKNPIDFLEAKGYKEVKKDLIIKLPKYSLFELENGRKRMLASAGELQKGNELALPSKYVNFLYLASHYEKLKGSP | CP1012 |
| | EDNEQKQLFVEQHKHYLDEIIEQISEFSKRVILADANLDKVLSAYNKHRDKPIREQAENIIHLFTLTNLGAPAAFKYFDTTIDRKRYTSTKEVLDATLIHQSITGLYETRIDLSQLGGD | [Synthetic] |
| 18 | EIGKATAKYFFYSNIMNFFKTEITLANGEIRKRPLIETNGETGEIVWDKGRDFATVRKVLSMPQVNIVKKTEVQTGGFSKESILPKRNSDKLIARKKDWDPKKYGGFDSPTVAYSVLVV | Cas9 varient |
| | AKVEKGKSKKLKSVKELLGITIMERSSFEKNPIDFLEAKGYKEVKKDLIIKLPKYSLFELENGRKRMLASAGELQKGNELALPSKYVNFLYLASHYEKLKGSPEDNEQKQLFVEQHKHY | CP1028 |
| | LDEIIEQISEFSKRVILADANLDKVLSAYNKHRDKPIREQAENIIHLFTLTNLGAPAAFKYFDTTIDRKRYTSTKEVLDATLIHQSITGLYETRIDLSQLGGD | [Synthetic] |
| 19 | NIMNFFKTEITLANGEIRKRPLIETNGETGEIVWDKGRDFATVRKVLSMPQVNIVKKTEVQTGGFSKESILPKRNSDKLIARKKDWDPKKYGGFDSPTVAYSVLVVAKVEKGKSKKLKS | Cas9 varient |
| | VKELLGITIMERSSFEKNPIDFLEAKGYKEVKKDLIIKLPKYSLFELENGRKRMLASAGELQKGNELALPSKYVNFLYLASHYEKLKGSPEDNEQKQLFVEQHKHYLDEIIEQISEFSK | CP1041[Synthetic] |
| | RVILADANLDKVLSAYNKHRDKPIREQAENIIHLFTLTNLGAPAAFKYFDTTIDRKRYTSTKEVLDATLIHQSITGLYETRIDLSQLGGD | |
| 20 | PEDNEQKQLFVEQHKHYLDEIIEQISEFSKRVILADANLDKVLSAYNKHRDKPIREQAENIIHLFTLTNLGAPAAFKYFDTTIDRKRYTSTKEVLDATLIHQSITGLYETRIDLSQLGG | Cas9 varient |
| | D | CP1249 |
| | | [Synthetic] |
| 21 | KPIREQAENIIHLFTLTNLGAPAAFKYFDTTIDRKRYTSTKEVLDATLIHQSITGLYETRIDLSQLGGD | Cas9 varient |
| | | CP1300 |
| | | [Synthetic] |
| | Cas9 with non-canonical PAM specificity | |
| 22 | MDKKYSIGLDIGTNSVGWAVITDEYKVPSKKFKVLGNTDRHSIKKNLIGALLFDSGETAEATRLKRTARRRYTRRKNRICYLQEIFSNEMAKVDDSFFHRLEESFLVEEDKKHERHPIF | SpCas9-NRRH |
| | GNIVDEVAYHEKYPTIYHLRKKLVDSTDKADLRLIYLALAHMIKFRGHFLIEGDLNPDNSDVDKLFIQLVQTYNQLFEENPINASGVDAKAILSARLSKSRRLENLIAQLPGEKKNGLF | variant with non- |
| | GNLIALSLGLTPNFKSNFDLAEDAKLQLSKDTYDDDLDNLLAQIGDQYADLFLAAKNLSDAILLSDILRVNTEITKAPLSASMVKRYDEHHQDLTLLKALVRQQLPEKYKEIFFDQSKN | canonical PAM |
| | GYAGYIDGGASQEEFYKFIKPILEKMDGTEELLVKLNREDLLRKQRTFDNGIIPHQIHLGELHAILRRQGDFYPFLKDNREKIEKILTFRIPYYVGPLARGNSRFAWMTRKSEETITPW | specificity |
| | NFEEVVDKGASAQSFIERMTNFDKNLPNEKVLPKHSLLYEYFTVYNELTKVKYVTEGMRKPAFLSGEQKKAIVDLLFKTNRKVTVKQLKEDYFKKIECFDSVEISGVEDRFNASLGTYH | [Synthetic] |
| | DLLKIIKDKDFLDNEENEDILEDIVLTLTLFEDREMIEERLKTYAHLFDDKVMKQLKRLRYTGWGRLSRKLINGIRDKQSGKTILDFLKSDGFANRNFMQLIHDDSLTFKEDIQKAQVS | |
| | GQGDSLHEHIANLAGSPAIKKGILQTVKVVDELVKVMGGHKPENIVIEMARENQTTQKGQKNSRERMKRIEEGIKELGSQILKEHPVENTQLQNEKLYLYYLQNGRDMYVDQELDINRL | |
| | SDYDVDHIVPQSFLKDDSIDNKVLTRSDKNRGKSDNVPSEEVVKKMKNYWRQLLNAKLITQRKFDNLTKAERGGLSELDKAGFIKRQLVETRQITKHVAQILDSRMNTKYDENDKLIRE | |
| | VKVITLKSKLVSDFRKDFQFYKVREINNYHHAHDAYLNAVVGTALIKKYPKLESEFVYGDYKVYDVRKMIAKSEQEIGKATAKYFFYSNIMNFFKTEITLANGEIRKRPLIETNGETGE | |
| | IVWDKGRDFATVRKVLSMPQVNIVKKTEVQTGGFSKESILPKGNSDKLIARKKDWDPKKYGGFNSPTAAYSVLVVAKVEKGKSKKLKSVKELLGITIMERSSFEKNPIGFLEAKGYKEV | |
| | KKDLIIKLPKYSLFELENGRKRMLASAGVLHKGNELALPSKYVNFLYLASHYEKLKGSPEDNEQKQLFVEQHKHYLDEIIEQISEFSKRVILADANLDKVLSAYNKHRDKPIREQAENI | |
| | IHLFTLTNLGVPAAFKYFDTTIDKKRYTSTKEVLDATLIHQSITGLYETRIDLSQLGGD | |
| 23 | MDKKYSIGLDIGTNSVGWAVITDEYKVPSKKFKVLGNTDRHSIKKNLIGALLFDSGETAEATRLKRTARRRYTRRKNRICYLQEIFSNEMAKVDDSFFHRLEESFLVEEDKKHERHPIF | SpCas9-NRCH |
| | GNIVDEVAYHEKYPTIYHLRKKLVDSTDKADLRLIYLALAHMIKFRGHFLIEGDLNPDNSDVDKLFIQLVQTYNQLFEENPINASGVDAKAILSARLSKSRRLENLIAQLPGEKKNGLF | variant with non- |
| | GNLIALSLGLTPNFKSNFDLAEDAKLQLSKDTYDDDLDNLLAQIGDQYADLFLAAKNLSDAILLSDILRVNTEITKAPLSASMVKRYDEHHQDLTLLKALVRQQLPEKYKEIFFDQSKN | canonical PAM |
| | GYAGYIDGGASQEEFYKFIKPILEKMDGTEELLVKLNREDLLRKQRTFDNGIIPHQIHLGELHAILRRQGDFYPFLKDNREKIEKILTFRIPYYVGPLARGNSRFAWMTRKSEETITPW | specificity |
| | NFEEVVDKGASAQSFIERMTNFDKNLPNEKVLPKHSLLYEYFTVYNELTKVKYVTEGMRKPAFLSGEQKKAIVDLLFKTNRKVTVKQLKEDYFKKIECFDSVEISGVEDRFNASLGTYH | [Synthetic] |
| | DLLKIIKDKDFLDNEENEDILEDIVLTLTLFEDREMIEERLKTYAHLFDDKVMKQLKRLRYTGWGRLSRKLINGIRDKQSGKTILDFLKSDGFANRNFMQLIHDDSLTFKEDIQKAQVS | |
| | GQGDSLHEHIANLAGSPAIKKGILQTVKVVDELVKVMGGHKPENIVIEMARENQTTQKGQKNSRERMKRIEEGIKELGSQILKEHPVENTQLQNEKLYLYYLQNGRDMYVDQELDINRL | |
| | SDYDVDHIVPQSFLKDDSIDNKVLTRSDKNRGKSDNVPSEEVVKKMKNYWRQLLNAKLITQRKFDNLTKAERGGLSELDKAGFIKRQLVETRQITKHVAQILDSRMNTKYDENDKLIRE | |
| | VKVITLKSKLVSDFRKDFQFYKVREINNYHHAHDAYLNAVVGTALIKKYPKLESEFVYGDYKVYDVRKMIAKSEQEIGKATAKYFFYSNIMNFFKTEITLANGEIRKRPLIETNGETGE | |
| | IVWDKGRDFATVRKVLSMPQVNIVKKTEVQTGGFSKESILPKGNSDKLIARKKDWDPKKYGGFNSPTVAYSVLVVAKVEKGKSKKLKSVKELLGITIMERSSFEKNPIDFLEAKGYKEV | |
| | KKDLIIKLPKYSLFELENGRKRMLASAGVLQKGNELALPSKYVNFLYLASHYEKLKGSPEDNEQKQLFVEQHKHYLDEIIEQISEFSKRVILADANLDKVLSAYNKHRDKPIREQAENI | |
| | IHLFTLTNLGAPAAFKYFDTTINRKQYNTTKEVLDATLIRQSITGLYETRIDLSQLGGD | |
| 24 | MDKKYSIGLDIGTNSVGWAVITDEYKVPSKKFKVLGNTDRHSIKKNLIGALLFDSGETAEATRLKRTARRRYTRRKNRICYLQEIFSNEMAKVDDSFFHRLEESFLVEEDKKHERHPIF | SpCas9-NRTH |
| | GNIVDEVAYHEKYPTIYHLRKKLVDSTDKADLRLIYLALAHMIKFRGHFLIEGDLNPDNSDVDKLFIQLVQTYNQLFEENPINASGVDAKAILSARLSKSRRLENLIAQLPGEKKNGLF | variant with non- |
| | GNLIALSLGLTPNFKSNFDLAEDAKLQLSKDTYDDDLDNLLAQIGDQYADLFLAAKNLSDAILLSDILRVNTEITKAPLSASMVKRYDEHHQDLTLLKALVRQQLPEKYKEIFFDQSKN | canonical PAM |
| | GYAGYIDGGASQEEFYKFIKPILEKMDGTEELLVKLNREDLLRKQRTFDNGIIPHQIHLGELHAILRRQGDFYPFLKDNREKIEKILTFRIPYYVGPLARGNSRFAWMTRKSEETITPW | specificity |
| | NFEEVVDKGASAQSFIERMTNFDKNLPNEKVLPKHSLLYEYFTVYNELTKVKYVTEGMRKPAFLSGEQKKAIVDLLFKTNRKVTVKQLKEDYFKKIECFDSVEISGVEDRFNASLGTYH | [Synthetic] |
| | DLLKIIKDKDFLDNEENEDILEDIVLTLTLFEDREMIEERLKTYAHLFDDKVMKQLKRLRYTGWGRLSRKLINGIRDKQSGKTILDFLKSDGFANRNFMQLIHDDSLTFKEDIQKAQVS | |
| | GQGDSLHEHIANLAGSPAIKKGILQTVKVVDELVKVMGGHKPENIVIEMARENQTTQKGQKNSRERMKRIEEGIKELGSQILKEHPVENTQLQNEKLYLYYLQNGRDMYVDQELDINRL | |
| | SDYDVDHIVPQSFLKDDSIDNKVLTRSDKNRGKSDNVPSEEVVKKMKNYWRQLLNAKLITQRKFDNLTKAERGGLSELDKAGFIKRQLVETRQITKHVAQILDSRMNTKYDENDKLIRE | |
| | VKVITLKSKLVSDFRKDFQFYKVREINNYHHAHDAYLNAVVGTALIKKYPKLESEFVYGDYKVYDVRKMIAKSEQEIGKATAKYFFYSNIMNFFKTEITLANGEIRKRPLIETNGETGE | |
| | IVWDKGRDFATVRKVLSMPQVNIVKKTEVQTGGFSKESILPKGNSDKLIARKKDWDPKKYGGFNSPTVAYSVLVVAKVEKGKSKKLKSVKELLGITIMERSSFEKNPIGFLEAKGYKEV | |
| | KKDLIIKLPKYSLFELENGRKRMLASASVLHKGNELALPSKYVNFLYLASHYEKLKGSSEDNKQKQLFVEQHKHYLDEIIEQISEFSKRVILADANLDKVLSAYNKHRDKPIREQAENI | |
| | IHLFTLTNLGASAAFKYFDTTIGRKLYTSTKEVLDATLIHQSITGLYETRIDLSQLGGD | |
| | High fidelity Cas9/other Cas9 mutants | |
| 25 | MDKKYSIGLDIGTNSVGWAVITDEYKVPSKKFKVLGNTDRHSIKKNLIGALLFDSGETAEATRLKRTARRRYTRRKNRICYLQEIFSNEMAKVDDSFFHRLEESFLVEEDKKHERHPIF | High fidelity |
| | GNIVDEVAYHEKYPTIYHLRKKLVDSTDKADLRLIYLALAHMIKFRGHFLIEGDLNPDNSDVDKLFIQLVQTYNQLFEENPINASGVDAKAILSARLSKSRRLENLIAQLPGEKKNGLF | Cas9 |
| | GNLIALSLGLTPNFKSNFDLAEDAKLQLSKDTYDDDLDNLLAQIGDQYADLFLAAKNLSDAILLSDILRVNTEITKAPLSASMIKRYDEHHQDLTLLKALVRQQLPEKYKEIFFDQSKN | (substitutions |
| | GYAGYIDGGASQEEFYKFIKPILEKMDGTEELLVKLNREDLLRKQRTFDNGSIPHQIHLGELHAILRRQEDFYPFLKDNREKIEKILTFRIPYYVGPLARGNSRFAWMTRKSEETITPW | relative to SEQ |
| | NFEEVVDKGASAQSFIERMTAFDKNLPNEKVLPKHSLLYEYFTVYNELTKVKYVTEGMRKPAFLSGEQKKAIVDLLFKTNRKVTVKQLKEDYFKKIECFDSVEISGVEDRFNASLGTYH | ID NO: 6) |
| | DLLKIIKDKDELDNEENEDILEDIVLTLTLFEDREMIEEELKTYAHLEDDKVMKQLKRRRYTGWGALSRKLINGIRDKQSGKTILDFLKSDGFANRNFMALIHDDSLTFKEDIQKAQVS | |
| | GQGDSLHEHIANLAGSPAIKKGILQTVKVVDELVKVMGRHHPENIVIEMARENQTTQKGQKNSRERMRIEEGIKELGSQILKEHPVENTQLQNNEKLYLYYLQNGRDMYVDQELDINRL | |
| | SDYDVDHIVPQSFLKDDSIDNKVLTRSDKNRGKSDNVPSEEVVKKMKNYWRQLLNAKLITQRKFDNLTKAERGGLSELDKAGFIKRQLVETRAITKHVAQILDSRMNTKYDENDKLIRE | |
| | VKVITLKSKLVSDFRKDFQFYKVREINNYHHAHDAYLNAVVGTALIKKYPKLESEFVYGDYKVYDVRKMIAKSEQEIGKATAKYFFYSNIMNFFKTEITLANGEIRKRPLIETNGETGE | |
| | IVWDKGRDFATVRKVLSMPQVNIVKKTEVQTGGFSKESILPKRNSDKLIARKKDWDPKKYGGFDSPTVAYSVLVVAKVEKGKSKKLKSVKELLGITIMERSSFEKNPIDFLEAKGYKEV | |
| | KKDLIIKLPKYSLFELENGRKRMLASAGELQKGNELALPSKYVNFLYLASHYEKLKGSPEDNEQKQLFVEQHKHYLDEIIEQISEFSKRVILADANLDKVLSAYNKHRDKPIREQAENI | |
| | IHLFTLTNLGAPAAFKYFDTTIDRKRYTSTKEVLDATLIHQSITGLYETRIDLSQLGGD | |
| 26 | MDKKYSIGLDIGTNSVGWAVITDEYKVPSKKFKVLGNTDRHSIKKNLIGALLFDSGETAEATRLKRTARRRYTRRKNRICYLQEIFSNEMAKVDDSFFHRLEESFLVEEDKKHERHPIF | Cas9 mutations |
| | GNIVDEVAYHEKYPTIYHLRKKLVDSTDKADLRLIYLALAHMIKFRGHFLIEGDLNPDNSDVDKLFIQLVQTYNQLFEENPINASGVDAKAILSARLSKSRRLENLIAQLPGEKKNGLF | [Synthetic] |
| | GNLIALSLGLTPNFKSNFDLAEDAKLQLSKDTYDDDLDNLLAQIGDQYADLFLAAKNLSDAILLSDILRVNTEITKAPLSASMIKRYDEHHQDLTLLKALVRQQLPEKYKEIFFDQSKN | |
| | GYAGYIDGGASQEEFYKFIKPILEKMDGTEELLVKLNREDLLRKQRTFDNGSIPHQIHLGELHAILRRQEDFYPFLKDNREKIEKILTFRIPYYVGPLARGNSRFAWMTRKSEETITPW | |
| | NFEEVVDKGASAQSFIERMTAFDKNLPNEKVLPKHSLLYEYFTVYNELTKVKYVTEGMRKPAFLSGEQKKAIVDLLFKTNRKVTVKQLKEDYFKKIECFDSVEISGVEDRFNASLGTYH | |
| | DLLKIIKDKDFLDNEENEDILEDIVLTLTLFEDREMIEERLKTYAHLFDDKVMKQLKRRRYTGWGALSRKLINGIRDKQSGKTILDFLKSDGFANRNFMALIHDDSLTFKEDIQKAQVS | |
| | GQGDSLHEHIANLAGSPAIKKGILQTVKVVDELVKVMGRHKPENIVIEMARENQTTQKGQKNSRERMKRIEEGIKELGSQILKEHPVENTQLQNEKLYLYYLQNGRDMYVDQELDINRL | |
| | SDYDVDHIVPQSFLKDDSIDNKVLTRSDKNRGKSDNVPSEEVVKKMKNYWRQLLNAKLITQRKFDNLTKAERGGLSELDKAGFIKRQLVETRAITKHVAQILDSRMNTKYDENDKLIRE | |
| | VKVITLKSKLVSDFRKDFQFYKVREINNYHHAHDAYLNAVVGTALIKKYPKLESEFVYGDYKVYDVRKMIAKSEQEIGKATAKYFFYSNIMNFFKTEITLANGEIRKRPLIETNGETGE | |
| | IVWDKGRDFATVRKVLSMPQVNIVKKTEVQTGGFSKESILPKRNSDKLIARKKDWDPKKYGGFDSPTVAYSVLVVAKVEKGKSKKLKSVKELLGITIMERSSFEKNPIDFLEAKGYKEV | |
| | KKDLIIKLPKYSLFELENGRKRMLASAGELQKGNELALPSKYVNFLYLASHYEKLKGSPEDNEQKQLFVEQHKHYLDEIIEQISEFSKRVILADANLDKVLSAYNKHRDKPIREQAENI | |
| | IHLFTLTNLGAPAAFKYFDTTIDRKRYTSTKEVLDATLIHQSITGLYETRIDLSQLGGD | |
| | cytidine deaminases | |
| 27 | MDSLLMNRRKFLYQFKNVRWAKGRRETYLCYVVKRRDSATSFSLDFGYLRNKNGCHVELLFLRYISDWDLDPGRCYRVTWFTSWSPCYDCARHVADFLRGNPNLSLRIFTARLYFCEDR | AID [Homo |
| | KAEPEGLRRLHRAGVQIAIMTFKDYFYCWNTFVENHERTFKAWEGLHENSVRLSRQLRRILLPLYEVDDLRDAFRTLGL | sapiens] |
| 28 | MDSLLMKQKKFLYHFKNVRWAKGRHETYLCYVVKRRDSATSCSLDFGHLRNKSGCHVELLFLRYISDWDLDPGRCYRVTWFTSWSPCYDCARHVAEFLRWNPNLSLRIFTARLYFCEDR | AID [Mus |
| | KAEPEGLRRLHRAGVQIGIMTFKDYFYCWNTFVENRERTFKAWEGLHENSVRLTRQLRRILLPLYEVDDLRDAFRMLGF | musculus] |
| 29 | MDSLLMKQRKFLYHFKNVRWAKGRHETYLCYVVKRRDSATSFSLDFGHLRNKSGCHVELLFLRYISDWDLDPGRCYRVTWFTSWSPCYDCARHVADFLRGYPNLSLRIFAARLYFCEDR | AID [Canis |
| | KAEPEGLRRLHRAGVQIAIMTFKDYFYCWNTFVENREKTFKAWEGLHENSVRLSRQLRRILLPLYEVDDLRDAFRTLGL | familiaris] |
| 30 | MDSLLKKQRQFLYQFKNVRWAKGRHETYLCYVVKRRDSPTSFSLDFGHLRNKAGCHVELLFLRYISDWDLDPGRCYRVTWFTSWSPCYDCARHVADFLRGYPNLSLRIFTARLYFCDKE | AID [Bos taurus] |
| | RKAEPEGLRRLHRAGVQIAIMTFKDYFYCWNTFVENHERTFKAWEGLHENSVRLSRQLRRILLPLYEVDDLRDAFRTLGL | |
| 31 | MAVGSKPKAALVGPHWERERIWCFLCSTGLGTQQTGQTSRWLRPAATQDPVSPPRSLLMKQRKFLYHFKNVRWAKGRHETYLCYVVKRRDSATSFSLDFGYLRNKSGCHVELLFLRYIS | AID [Rattus] |
| | DWDLDPGRCYRVTWFTSWSPCYDCARHVADFLRGNPNLSLRIFTARLTGWGALPAGLMSPARPSDYFYCWNTFVENHERTFKAWEGLHENSVRLSRRLRRILLPLYEVDDLRDAFRTLG | |
| | L | |
| 32 | MGPFCLGCSHRKCYSPIRNLISQETFKFHFKNLGYAKGRKDTFLCYEVTRKDCDSPVSLHHGVFKNKDNIHAEICFLYWFHDKVLKVLSPREEFKITWYMSWSPCFECAEQIVRFLATH | ApoBEc-3 [mus |
| | HNLSLDIFSSRLYNVQDPETQQNLCRLVQEGAQVAAMDLYEFKKCWKKFVDNGGRRFRPWKRLLTNFRYQDSKLQEILRPCYIPVPSSSSSTLSNICLTKGLPETRFCVEGRRMDPLSE | musculus] |
| | EEFYSQFYNQRVKHLCYYHRMKPYLCYQLEQFNGQAPLKGCLLSEKGKQHAEILFLDKIRSMELSQVTITCYLTWSPCPNCAWQLAAFKRDRPDLILHIYTSRLYFHWKRPFQKGLCSL | |
| | WQSGILVDVMDLPQFTDCWTNFVNPKRPFWPWKGLEIISRRTQRRLRRIKESWGLQDLVNDFGNLQLGPPMS | |
| 33 | MGPFCLGCSHRKCYSPIRNLISQETFKFHFKNLRYAIDRKDTFLCYEVTRKDCDSPVSLHHGVFKNKDNIHAEICFLYWFHDKVLKVLSPREEFKITWYMSWSPCFECAEQVLRFLATH | APOBEC-3 [Rattus] |
| | HNLSLDIFSSRLYNIRDPENQQNLCRLVQEGAQVAAMDLYEFKKCWKKFVDNGGRRFRPWKKLLTNFRYQDSKLQEILRPCYIPVPSSSSSTLSNICLTKGLPETRFCVERRRVHLLSE | |
| | EEFYSQFYNQRVKHLCYYHGVKPYLCYQLEQFNGQAPLKGCLLSEKGKQHAEILFLDKIRSMELSQVIITCYLTWSPCPNCAWQLAAFKRDRPDLILHIYTSRLYFHWKRPFQKGLCSL | |
| | WQSGILVDVMDLPQFTDCWTNFVNPKRPFWPWKGLEIISRRTQRRLHRIKESWGLQDLVNDFGNLQLGPPMS | |
| 34 | MVEPMDPRTFVSNFNNRPILSGLNTVWLCCEVKTKDPSGPPLDAKIFQGKVYSKAKYHPEMRFLRWFHKWRQLHHDQEYKVTWYVSWSPCTRCANSVATFLAKDPKVTLTIFVARLYYF | APOBEC-3G [Macaca |
| | WKPDYQQALRILCQKRGGPHATMKIMNYNEFQDCWNKFVDGRGKPFKPRNNLPKHYTLLQATLGELLRHLMDPGTFTSNFNNKPWVSGQHETYLCYKVERLHNDTWVPLNQHRGFLRNQ | mulatta] Rhesus |
| | APNIHGFPKGRHAELCFLDLIPFWKLDGQQYRVTCFTSWSPCFSCAQEMAKFISNNEHVSLCIFAARIYDDQGRYQEGLRALHRDGAKIAMMNYSEFEYCWDTFVDRQGRPFQPWDGLD | macaque |
| | EHSQALSGRLRAI | |
| 35 | MKPHFRNPVERMYQDTFSDNFYNRPILSHRNTVWLCYEVKTKGPSRPPLDAKIFRGQVYSKLKYHPEMRFFHWFSKWRKLHRDQEYEVTWYISWSPCTKCTRDVATFLAEDPKVTLTIF | APOBEC-3G [Pan |
| | VARLYYFWDPDYQEALRSLCQKRDGPRATMKIMNYDEFQHCWSKFVYSQRELFEPWNNLPKYYILLHIMLGEILRHSMDPPTFTSNFNNELWVRGRHETYLCYEVERLHNDTWVLLNQR | troglodytes] - |
| | RGFLCNQAPHKHGFLEGRHAELCFLDVIPFWKLDLHQDYRVTCFTSWSPCFSCAQEMAKFISNNKHVSLCIFAARIYDDQGRCQEGLRTLAKAGAKISIMTYSEFKHCWDTFVDHQGCP | Chimpanzee |
| | FQPWDGLEEHSQALSGRLRAILQNQGN | |
| 36 | MNPQIRNMVEQMEPDIFVYYFNNRPILSGRNTVWLCYEVKTKDPSGPPLDANIFQGKLYPEAKDHPEMKFLHWFRKWRQLHRDQEYEVTWYVSWSPCTRCANSVATFLAEDPKVTLTIF | APOBEC-3G |
| | VARLYYFWKPDYQQALRILCQERGGPHATMKIMNYNEFQHCWNEFVDGQGKPFKPRKNLPKHYTLLHATLGELLRHVMDPGTFTSNFNNKPWVSGQRETYLCYKVERSHNDTWVLLNQH | [Chlorocebus |
| | RGFLRNQAPDRHGFPKGRHAELCFLDLIPFWKLDDQQYRVTCFTSWSPCFSCAQKMAKFISNNKHVSLCIFAARIYDDQGRC37QEGLRTLHRDGAKIAVMNYSEFEYCWDTFVDRQGR | sabaeus] |
| | PFQPWDGLDEHSQALSGRLRAI | |
| 37 | MK38PHFRNTVERMYRDTFSYNFYNRPILSRRNTVWLCYEVKTKGPSRPPLDAKIFRGQVYSELKYHPEMRFFHWFSKWRKLHR39DQEYEVTWYISWSPCTKCTRDMATFLAEDPKVT | APOBEC-3G [Homo |
| | LTIFVARLYYFWDPDYQEALRSLCQKRDGPRATMKIMNYDEFQHCWSKFVYSQRELFEPWNNLPKYYILLHIMLGEILRHSMDPPTFTFNFNNEPWVRGRHETYLCYEVERMHNDTWVL | sapiens] |
| | LNQRRGFLCNQAPHKHGFLEGRHAELCFLDVIPFWKLDLDQDYRVTCFTSWSPCFSCAQEMAKFISKNKHVSLCIFTARIYDDQGRCQEGLRTLAEAGAKISIMTYSEFKHCWDTFVDH | |
| | QGCPFQPWDGLDEHSQDLSGRLRAILQNQEN | |
| 38 | MKPHFRNTVERMYRDTFSYNFYNRPILSRRNTVWLCYEVKTKGPSRPRLDAKIFRGQVYSQPEHHAEMCFLSWFCGNQLPAYKCFQITWFVSWTPCPDCVAKLAEFLAEHPNVTLTISA | APOBEC-3F [Homo |
| | ARLYYYWERDYRRALCRLSQAGARVKIMDDEEFAYCWENFVYSEGQPFMPWYKFDDNYAFLHRTLKEILRNPMEAMYPHIFYFHFKNLRKAYGRNESWLCFTMEVVKHHSPVSWKRGVF | sapiens] |
| | RNQVDPETHCHAERCFLSWFCDDILSPNTNYEVTWYTSWSPCPECAGEVAEFLARHSNVNLTIFTARLYYFWDTDYQEGLRSLSQEGASVEIMGYKDFKYCWENFVYNDDEPFKPWKGL | |
| | KYNFLFLDSKLQEILE | |
| 39 | MNPQIRNPMERMYRDTFYDNFENEPILYGRSYTWLCYEVKIKRGRSNLLWDTGVFRGQVYFKPQYHAEMCFLSWFCGNQLPAYKCFQITWFVSWTPCPDCVAKLAEFLSEHPNVTLTIS | APOBEC-3B [Homo |
| | AARLYYYWERDYRRALCRLSQAGARVTIMDYEEFAYCWENFVYNEGQQFMPWYKFDENYAFLHRTLKEILRYLMDPDTFTFNFNNDPLVLRRRQTYLCYEVERLDNGTWVLMDQHMGFL | sapiens] |
| | CNEAKNLLCGFYGRHAELRFLDLVPSLQLDPAQIYRVTWFISWSPCFSWGCAGEVRAFLQENTHVRLRIFAARIYDYDPLYKEALQMLRDAGAQVSIMTYDEFEYCWDTFVYRQGCPFQ | |
| | PWDGLEEHSQALSGRLRAILQNQGN | |
| 40 | MQPQGLGPNAGMGPVCLGCSHRRPYSPIRNPLKKLYQQTFYFHFKNVRYAWGRKNNFLCYEVNGMDCALPVPLRQGVFRKQGHIHAELCFIYWFHDKVLRVLSPMEEFKVTWYMSWSPC | APOBEC-3B |
| | SKCAEQVARFLAAHRNLSLAIFSSRLYYYLRNPNYQQKLCRLIQEGVHVAAMDLPEFKKCWNKFVDNDGQPFRPWMRLRINFSFYDCKLQEIFSRMNLLREDVFYLQFNNSHRVKPVQN | [Rattus] |
| | RYYRRKSYLCYQLERANGQEPLKGYLLYKKGEQHVEILFLEKMRSMELSQVRITCYLTWSPCPNCARQLAAFKKDHPDLILRIYTSRLYFYWRKKFQKGLCTLWRSGIHVDVMDLPQFA | |
| | DCWTNFVNPQRPFRPWNELEKNSWRIQRRLRRIKESWGL | |
| 41 | DGWEVAFRSGTVLKAGVLGVSMTEGWAGSGHPGQGACVWTPGTRNTMNLLREVLFKQQFGNQPRVPAPYYRRKTYLCYQLKQRNDLTLDRGCFRNKKQRHAEIRFIDKINSLDLNPSQS | APOBEC-3B [Bos |
| | YKIICYITWSPCPNCANELVNFITRNNHLKLEIFASRLYFHWIKSFKMGLQDLQNAGISVAVMTHTEFEDCWEQFVDNQSRPFQPWDKLEQYSASIRRRLQRILTAPI | taurus] |
| 42 | MNPQIRNPMEWMYQRTFYYNFENEPILYGRSYTWLCYEVKIRRGHSNLLWDTGVFRGQMYSQPEHHAEMCFLSWFCGNQLSAYKCFQITWFVSWTPCPDCVAKLAKFLAEHPNVTLTIS | APOBEC-3B [Pan |
| | AARLYYYWERDYRRALCRLSQAGARVKIMDDEEFAYCWENFVYNEGQPFMPWYKFDDNYAFLHRTLKEIIRHLMDPDTFTFNFNNDPLVLRRHQTYLCYEVERLDNGTWVLMDQHMGFL | troglodytes] |
| | CNEAKNLLCGFYGRHAELRFLDLVPSLQLDPAQIYRVTWFISWSPCFSWGCAGQVRAFLQENTHVRLRIFAARIYDYDPLYKEALQMLRDAGAQVSIMTYDEFEYCWDTFVYRQGCPFQ | |
| | PWDGLEEHSQALSGRLRAILQVRASSLCMVPHRPPPPPQSPGPCLPLCSEPPLGSLLPTGRPAPSLPFLLTASFSFPPPASLPPLPSLSLSPGHLPVPSFHSLTSCSIQPPCSSRIRET | |
| | EGWASVSKEGRDLG | |
| 43 | MNPQIRNPMKAMYPGTFYFQFKNLWEANDRNETWLCFTVEGIKRRSVVSWKTGVFRNQVDSETHCHAERCFLSWFCDDILSPNTKYQVTWYTSWSPCPDCAGEVAEFLARHSNVNLTIF | APOBEC-3C [Homo |
| | TARLYYFQYPCYQEGLRSLSQEGVAVEIMDYEDFKYCWENFVYNDNEPFKPWKGLKTNFRLLKRRLRESLQ | sapiens] |
| 44 | MNPQIRNPMKAMYPGTFYFQFKNLWEANDRNETWLCFTVEGIKRRSVVSWKTGVFRNQVDSETHCHAERCFLSWFCDDILSPNTNYQVTWYTSWSPCPECAGEVAEFLARHSNVNLTIF | Gorilla APOBEC3C |
| | TARLYYFQDTDYQEGLRSLSQEGVAVKIMDYKDFKYCWENFVYNDDEPFKPWKGLKYNFRFLKRRLQEILE | [Gorilla gorilla] |
| 45 | MEASPASGPRHLMDPHIFTSNFNNGIGRHKTYLCYEVERLDNGTSVKMDQHRGFLHNQAKNLLCGFYGRHAELRFLDLVPSLQLDPAQIYRVTWFISWSPCFSWGCAGEVRAFLQENTH | APOBEC-3A [Homo |
| | VRLRIFAARIYDYDPLYKEALQMLRDAGAQVSIMTYDEFKHCWDTFVDHQGCPFQPWDGLDEHSQALSGRLRAILQNQGN | sapiens] |
| 46 | MDGSPASRPRHLMDPNTFTFNFNNDLSVRGRHQTYLCYEVERLDNGTWVPMDERRGFLCNKAKNVPCGDYGCHVELRFLCEVPSWQLDPAQTYRVTWFISWSPCFRRGCAGQVRVFLQE | APOBEC-3A [Macaca |
| | NKHVRLRIFAARIYDYDPLYQEALRTLRDAGAQVSIMTYEEFKHCWDTFVDRQGRPFQPWDGLDEHSQALSGRLRAILQNQGN | mulatta] |
| 47 | MDEYTFTENFNNQGWPSKTYLCYEMERLDGDATIPLDEYKGFVRNKGLDQPEKPCHAELYFLGKIHSWNLDRNQHYRLTCFISWSPCYDCAQKLTTFLKENHHISLHILASRIYTHNRF | APOBEC-3A [Bos |
| | GCHQSGLCELQAAGARITIMTFEDFKHCWETFVDHKGKPFQPWEGLNVKSQALCTELQAILKTQQN | taurus |
| 48 | MALLTAETFRLQFNNKRRLRRPYYPRKALLCYQLTPQNGSTPTRGYFENKKKCHAEICFINEIKSMGLDETQCYQVTCYLTWSPCSSCAWELVDFIKAHDHLNLGIFASRLYYHWCKPQ | APOBEC-3H [Homo |
| | QKGLRLLCGSQVPVEVMGFPKFADCWENFVDHEKPLSFNPYKMLEELDKNSRAIKRRLERIKIPGVRAQGRYMDILCDAEV | sapiens] |
| 49 | MALLTAKTFSLQFNNKRRVNKPYYPRKALLCYQLTPQNGSTPTRGHLKNKKKDHAEIRFINKIKSMGLDETQCYQVTCYLTWSPCPSCAGELVDFIKAHRHLNLRIFASRLYYHWRPNY | APOBEC-3H [Macaca |
| | QEGLLLLCGSQVPVEVMGLPEFTDCWENFVDHKEPPSFNPSEKLEELDKNSQAIKRRLERIKSRSVDVLENGLRSLQLGPVTPSSSIRNSR | mulatta] |
| 50 | MNPQIRNPMERMYRDTFYDNFENEPILYGRSYTWLCYEVKIKRGRSNLLWDTGVFRGPVLPKRQSNHRQEVYFRFENHAEMCFLSWFCGNRLPANRRFQITWFVSWNPCLPCVVKVTKF | APOBEC-3D [Homo |
| | LAEHPNVTLTISAARLYYYRDRDWRWVLLRLHKAGARVKIMDYEDFAYCWENFVCNEGQPFMPWYKFDDNYASLHRTLKEILRNPMEAMYPHIFYFHFKNLLKACGRNESWLCFTMEVT | sapiens] |
| | KHHSAVFRKRGVFRNQVDPETHCHAERCFLSWFCDDILSPNTNYEVTWYTSWSPCPECAGEVAEFLARHSNVNLTIFTARLCYFWDTDYQEGLCSLSQEGASVKIMGYKDFVSCWKNFV | |
| | YSDDEPFKPWKGLQTNFRLLKRRLREILQ | |
| 51 | MTSEKGPSTGDPTLRRRIEPWEFDVFYDPRELRKEACLLYEIKWGMSRKIWRSSGKNTTNHVEVNFIKKFTSERDFHPSMSCSITWFLSWSPCWECSQAIREFLSRHPGVTLVIYVARL | APOBEC-1 [Homo |
| | FWHMDQQNRQGLRDLVNSGVTIQIMRASEYYHCWRNFVNYPPGDEAHWPQYPPLWMMLYALELHCIILSLPPCLKISRRWQNHLTFFRLHLQNCHYQTIPPHILLATGLIHPSVAWR | sapiens] |
| 52 | MSSETGPVAVDPTLRRRIEPHEFEVFFDPRELRKETCLLYEINWGGRHSVWRHTSQNTSNHVEVNFLEKFTTERYFRPNTRCSITWFLSWSPCGECSRAITEFLSRHPYVTLFIYIARL | APOBEC-1 [Mus |
| | YHHTDQRNRQGLRDLISSGVTIQIMTEQEYCYCWRNFVNYPPSNEAYWPRYPHLWVKLYVLELYCIILGLPPCLKILRRKQPQLTFFTITLQTCHYQRIPPHLLWATGLK | musculus] |
| 53 | MSSETGPVAVDPTLRRRIEPHEFEVFFDPRELRKETCLLYEINWGGRHSIWRHTSQNTNKHVEVNFIEKFTTERYFCPNTRCSITWFLSWSPCGECSRAITEFLSRYPHVTLFIYIARL | APOBEC-1 [Rattus] |
| | YHHADPRNRQGLRDLISSGVTIQIMTEQESGYCWRNFVNYSPSNEAHWPRYPHLWVRLYVLELYCIILGLPPCLNILRRKQPQLTFFTIALQSCHYQRLPPHILWATGLK | |
| 54 | MAQKEEAAVATEAASQNGEDLENLDDPEKLKELIELPPFEIVTGERLPANFFKFQFRNVEYSSGRNKTFLCYVVEAQGKGGQVQASRGYLEDEHAAAHAEEAFFNTILPAFDPALRYNV | APOBEC-2 [Homo |
| | TWYVSSSPCAACADRIIKTLSKTKNLRLLILVGRLFMWEEPEIQAALKKLKEAGCKLRIMKPQDFEYVWQNFVEQEEGESKAFQPWEDIQENFLYYEEKLADILK | sapiens] |
| 55 | MAQKEEAAEAAAPASQNGDDLENLEDPEKLKELIDLPPFEIVTGVRLPVNFFKFQFRNVEYSSGRNKTFLCYVVEVQSKGGQAQATQGYLEDEHAGAHAEEAFFNTILPAFDPALKYNV | APOBEC-2 [Mus |
| | TWYVSSSPCAACADRILKTLSKTKNLRLLILVSRLFMWEEPEVQAALKKLKEAGCKLRIMKPQDFEYIWQNFVEQEEGESKAFEPWEDIQENFLYYEEKLADILK | musculus] |
| 56 | MAQKEEAAEAAAPASQNGDDLENLEDPEKLKELIDLPPFEIVTGVRLPVNFFKFQFRNVEYSSGRNKTFLCYVVEAQSKGGQVQATQGYLEDEHAGAHAEEAFFNTILPAFDPALKYNV | APOBEC-2 [Rattus] |
| | TWYVSSSPCAACADRILKTLSKTKNLRLLILVSRLFMWEEPEVQAALKKLKEAGCKLRIMKPQDFEYLWQNFVEQEEGESKAFEPWEDIQENFLYYEEKLADILK | |
| 57 | MAQKEEAAAAAEPASQNGEEVENLEDPEKLKELIELPPFEIVTGERLPAHYFKFQFRNVEYSSGRNKTFLCYVVEAQSKGGQVQASRGYLEDEHATNHAEEAFFNSIMPTFDPALRYMV | APOBEC-2 [Bos |
| | TWYVSSSPCAACADRIVKTLNKTKNLRLLILVGRLFMWEEPEIQAALRKLKEAGCRLRIMKPQDFEYIWQNFVEQEEGESKAFEPWEDIQENFLYYEEKLADILK | taurus] |
| 58 | MTDAEYVRIHEKLDIYTFKKQFFNNKKSVSHRCYVLFELKRRGERRACFWGYAVNKPQSGTERGIHAEIFSIRKVEEYLRDNPGQFTINWYSSWSPCADCAEKILEWYNQELRGNGHTL | CDA1 [Petromyzon |
| | KIWACKLYYEKNARNQIGLWNLRDNGVGLNVMVSEHYQCCRKIFIQSSHNQLNENRWLEKTLKRAEKRRSELSIMIQVKILHTTKSPAV | marinus] |
| 59 | MKPHFRNTVERMYRDTFSYNFYNRPILSRRNTVWLCYEVKTKGPSRPPLDAKIFRGQVYSELKYHPEMRFFHWFSKWRKLHRDQEYEVTWYISWSPCTKCTRDMATFLAEDPKVTLTIF | APOBEC3G |
| | VARLYYFWDPDYQEALRSLCQKRDGPRATMKIMNYDEFQHCWSKFVYSQRELFEPWNNLPKYYILLHIMLGEILRHSMDPPTFTFNFNNEPWVRGRHETYLCYEVERMHNDTWVLLNQR | D316R_D317R [Homo |
| | RGFLCNQAPHKHGFLEGRHAELCFLDVIPFWKLDLDQDYRVTCFTSWSPCFSCAQEMAKFISKNKHVSLCIFTARIYRRQGRCQEGLRTLAEAGAKISIMTYSEFKHCWDTFVDHQGCP | sapiens] |
| | FQPWDGLDEHSQDLSGRLRAILQNQEN | |
| 60 | MDPPTFTFNFNNEPWVRGRHETYLCYEVERMHNDTWVLLNQRRGFLCNQAPHKHGFLEGRHAELCFLDVIPFWKLDLDQDYRVTCFTSWSPCFSCAQEMAKFISKNKHVSLCIFTARIY | APOBEC3G [Homo |
| | DDQGRCQEGLRTLAEAGAKISIMTYSEFKHCWDTFVDHQGCPFQPWDGLDEHSQDLSGRLRAILQ | sapiens] |
| 61 | MDPPTFTFNFNNEPWVRGRHETYLCYEVERMHNDTWVLLNQRRGFLCNQAPHKHGFLEGRHAELCFLDVIPFWKLDLDQDYRVTCFTSWSPCFSCAQEMAKFISKNKHVSLCIFTARIY | APOBEC3G |
| | RRQGRCQEGLRTLAEAGAKISIMTYSEFKHCWDTFVDHQGCPFQPWDGLDEHSQDLSGRLRAILQ | D120R_D121R [Homo |
| | | sapiens] |
| | adenosine deaminases | |
| 62 | EACKALGTWRLEGATLYVTLEPCPMCAGAVVLSRVEKVVFGAFDPKGGCSGTLMNLLQEERFNHQAEVVSGVLEEECGGMLSAFFRELRKKKKAARKNLSE | TadA [Bacillus |
| | | subtilis] |
| 63 | MTQDELYMKEAIKEAKKAEEKGEVPIGAVLVINGEIIARAHNLRETEQRSIAHAEMLVIDEACKALGTWRLEGATLYVTLEPCPMCAGAVVLSRVEKVVFGAFDPKGGCSGTLMNLLQE | TadA [Bacillus |
| | ERFNHQAEVVSGVLEEECGGMLSAFFRELRKKKKAARKNLSE | subtilis] |
| 64 | MSEVEFSHEYWMRHALTLAKRAWDEREVPVGAVLVHNNRVIGEGWNRPIGRHDPTAHAAIMALRQGGLVMQNYRLIDATLYVTLEPCVMCAGAMIHSRIGRVVFGARDAKTGAAGSLMD | TadA, |
| | VLHHPGMNHRVEITEGILADECAALLSDFFRMRRQEIKAQKKAQSSTD | catalytically |
| | | inactive (E59A) |
| | | [E. coli] |
| 65 | MSEVEFSHEYWMRHALTLAKRARDEREVPVGAVLVLNNRVIGEGWNRAIGLHDPTAHAEIMALRQGGLVMQNYRLIDATLYVTFEPCVMCAGAMIHSRIGRVVFGVRNAKTGAAGSLMD | TadA 7.10 |
| | VLHYPGMNHRVEITEGILADECAALLCYFFRMPRQVFNAQKKAQSSTD | [Synthetic] |
| 66 | MSEVEFSHEYWMRHALTLAKRARDEREVPVGAVLVLNNRVIGEGWNRAIGLHDPTAHAEIMALRQGGLVMQNYRLIDATLYVTFEPCVMCAGAMIHSRIGRVVFGWRNAKTGAAGSLMD | TadA 7.10 |
| | VLHYPGMNHRVEITEGILADECAALLCYFFRMPRQVFNAQKKAQSSTD | (V106W) [Synthetic] |
| 67 | MSEVEFSHEYWMRHALTLAKRARDEREVPVGAVLVLNNRVIGEGWNRAIGLHDPTAHAEIMALRQGGLVMQNYRLIDATLYVTFEPCVMCAGAMIHSRIGRVVFGVRWAKTGAAGSLMD | TadA 7.10 |
| | VLHYPGMNHRVEITEGILADECAALLCYFFRMPRQVFNAQKKAQSSTD | (N108W) [Synthetic] |
| 68 | MSEVEFSHEYWMRHALTLAKRARDEREVPVGAVLVLNNRVIGEGWNRAIGLHDPTAHAEIMALRQGGLVMQNYRLIDATLYVTFEPCVMCAGAMIHSRIGRVVFGVRQAKTGAAGSLMD | TadA 7.10 |
| | VLHYPGMNHRVEITEGILADECAALLCYFFRMPRQVFNAQKKAQSSTD | (N108Q) [Synthetic] |
| 69 | MSEVEFSHEYWMRHALTLAKRARDEREVPVGAVLVLNNRVIGEGWNRAIGLHDPTAHAEIMALRQGGLVMQNYRLIDATLYVTFEPCVMCAGAMIHSRIGRVVFGFRNAKTGAAGSLMD | TadA 7.10 |
| | VLHYPGMNHRVEITEGILADECAALLCYFFRMPRQVFNAQKKAQSSTD | (V106F) [Synthetic] |
| 70 | MSEVEFSHEYWMRHALTLAKRARDEREVPVGAVLVLNNRVIGEGWNRAIGLHDPTAHAEIMALRQGGLVMQNYRLIDATLYVTFEPCVMCAGAMIHSRIGRVVFGQRNAKTGAAGSLMD | tadA 7.10 (V106Q) |
| | VLHYPGMNHRVEITEGILADECAALLCYFFRMPRQVFNAQKKAQSSTD | [Synthetic] |
| 71 | MSEVEFSHEYWMRHALTLAKRARDEREVPVGAVLVLNNRVIGEGWNRAIGLHDPTAHAEIMALRQGGLVMQNYRLIDATLYVTFEPCVMCAGAMIHSRIGRVVFGMRNAKTGAAGSLMD | tadA 7.10 (V106M) |
| | VLHYPGMNHRVEITEGILADECAALLCYFFRMPRQVFNAQKKAQSSTD | [Synthetic] |
| 72 | MSEVEFSHEYWMRHALTLAKRARDEREVPVGAVLVLNNRVIGEGWNFAIGLHDPTAHAEIMALRQGGLVMQNYRLIDATLYVTFEPCVMCAGAMIHSRIGRVVFGVRNAKTGAAGSLMD | tadA 7.10 |
| | VLHYPGMNHRVEITEGILADECAALLCYFFRMPRQVFNAQKKAQSSTD | (R47F) [Synthetic] |
| 73 | MSEVEFSHEYWMRHALTLAKRARDEREVPVGAVLVLNNRVIGEGWNWAIGLHDPTAHAEIMALRQGGLVMQNYRLIDATLYVTFEPCVMCAGAMIHSRIGRVVFGVRNAKTGAAGSLMD | tadA 7.10 |
| | VLHYPGMNHRVEITEGILADECAALLCYFFRMPRQVFNAQKKAQSSTD | (R47W)[Synthetic] |
| 74 | MSEVEFSHEYWMRHALTLAKRARDEREVPVGAVLVLNNRVIGEGWNQAIGLHDPTAHAEIMALRQGGLVMQNYRLIDATLYVTFEPCVMCAGAMIHSRIGRVVFGVRNAKTGAAGSLMD | tadA 7.10 |
| | VLHYPGMNHRVEITEGILADECAALLCYFFRMPRQVFNAQKKAQSSTD | (R47Q)[Synthetic] |
| 75 | MSEVEFSHEYWMRHALTLAKRARDEREVPVGAVLVLNNRVIGEGWNMAIGLHDPTAHAEIMALRQGGLVMQNYRLIDATLYVTFEPCVMCAGAMIHSRIGRVVFGVRNAKTGAAGSLMD | tadA 7.10 |
| | VLHYPGMNHRVEITEGILADECAALLCYFFRMPRQVFNAQKKAQSSTD | (R47M)[Synthetic] |
| 76 | MSEVEFSHEYWMRHALTLAKRAWDEREVPVGAVLVHNNRVIGEGWNRPIGRHDPTAHAQIMALRQGGLVMQNYRLIDATLYVTLEPCVMCAGAMIHSRIGRVVFGARDAKTGAAGSLMD | TadA |
| | VLHHPGMNHRVEITEGILADECAALLSDFFRMRRQEIKAQKKAQSSTD | (E59Q)[Synthetic] |
| 77 | MSEVEFSHEYWMRHALTLAKRAWDEREVPVGAVLVHNNRVIGEGWNRPIGRHDPTAHAEIMALRQGGLVMQNYRLIDATLYVTLEPCVMCAGAMIHSRIGRVVFGARDAKTGAAGSLMD | TadA, N-terminal |
| | VLHHPGMNHRVEITEGILADECAALLSDFFRMRRQEIKAQKKAQSSTD | truncated [E. |
| | | coli] |
| 78 | MRRAFITGVFFLSEVEFSHEYWMRHALTLAKRAWDEREVPVGAVLVHNNRVIGEGWNRPIGRHDPTAHAEIMALRQGGLVMQNYRLIDATLYVTLEPCVMCAGAMIHSRIGRVVFGARD | TadA [E. coli] |
| | AKTGAAGSLMDVLHHPGMNHRVEITEGILADECAALLSDFFRMRRQEIKAQKKAQSSTD | |
| 79 | MGSHMTNDIYFMTLAIEEAKKAAQLGEVPIGAIITKDDEVIARAHNLRETLQQPTAHAEHIAIERAAKVLGSWRLEGCTLYVTLEPCVMCAGTIVMSRIPRVVYGADDPKGGCSGSLMN | TadA |
| | LLQQSNFNHRAIVDKGVLKEACSTLLTTFFKNLRANKKSTN | [Staphylococcus |
| | | aureus] |
| 80 | MPPAFITGVTSLSDVELDHEYWMRHALTLAKRAWDEREVPVGAVLVHNHRVIGEGWNRPIGRHDPTAHAEIMALRQGGLVLQNYRLLDTTLYVTLEPCVMCAGAMVHSRIGRVVFGARD | TadA [S. |
| | AKTGAAGSLIDVLHHPGMNHRVEIIEGVLRDECATLLSDFFRMRRQEIKALKKADRAEGAGPAV | typhimurium] |
| 81 | MDEYWMQVAMQMAEKAEAAGEVPVGAVLVKDGQQIATGYNLSISQHDPTAHAEILCLRSAGKKLENYRLLDATLYITLEPCAMCAGAMVHSRIARVVYGARDEKTGAAGTVVNLLQHPA | TadA [S. |
| | FNHQVEVTSGVLAEACSAQLSRFFKRRRDEKKALKLAQRAQQGIE | putrefaciens] |
| 82 | MDAAKVRSEFDEKMMRYALELADKAEALGEIPVGAVLVDDARNIIGEGWNLSIVQSDPTAHAEIIALRNGAKNIQNYRLLNSTLYVTLEPCTMCAGAILHSRIKRLVFGASDYKTGAIG | TadA [H. |
| | SRFHFFDDYKMNHTLEITSGVLAEECSQKLSTFFQKRREEKKIEKALLKSLSDK | influenzae] |
| 83 | MRTDESEDQDHRMMRLALDAARAAAEAGETPVGAVILDPSTGEVIATAGNGPIAAHDPTAHAEIAAMRAAAAKLGNYRLTDLTLVVTLEPCAMCAGAISHARIGRVVFGADDPKGGAVV | TadA [Caulobacter |
| | HGPKFFAQPTCHWRPEVTGGVLADESADLLRGFFRARRKAKI | crescentus] |
| 84 | MSSLKKTPIRDDAYWMGKAIREAAKAAARDEVPIGAVIVRDGAVIGRGHNLREGSNDPSAHAEMIAIRQAARRSANWRLTGATLYVTLEPCLMCMGAIILARLERVVFGCYDPKGGAAG | TadA [G. |
| | SLYDLSADPRLNHQVRLSPGVCQEECGTMLSDFFRDLRRRKKAKATPALFIDERKVPPEP | sulfurreducens] |
| 85 | GAGGCCAGCGGTTCCGGACGGGCTGACGCATTGGACGATTTTGATCTGGATATGCTGGGAAGTGACGCCCTCGATGATTTTGACCTTGACATGCTTGGTTCGGATGCCCTTGATGACTT | TAD [Synthetic] |
| | TGACCTCGACATGCTCGGCAGTGACGCCCTTGATGATTTCGACCTGGACATGCTGATTAACTCTAGATAG | |
| 86 | EASGSGRADALDDFDLDMLGSDALDDFDLDMLGSDALDDFDLDMLGSDALDDFDLDMLINSR | TAD [Synthetic] |
| 87 | TCGCCAGGGATCCGTCGACTTGACGCGTTGATATCAACAAGTTTGTACAAAAAAGCAGGCTACAAAGAGGCCAGCGGTTCCGGACGGGCTGACGCATTGGACGATTTTGATCTGGATAT | TAD [Synthetic] |
| | GCTGGGAAGTGACGCCCTCGATGATTTTGACCTTGACATGCTTGGTTCGGATGCCCTTGATGACTTTGACCTCGACATGCTCGGCAGTGACGCCCTTGATGATTTCGACCTGGACATGC | VPR compises a |
| | TGATTAACTCTAGAAGTTCCGGATCTCCGAAAAAGAAACGCAAAGTTGGTAGCCAGTACCTGCCCGACACCGACGACCGGCACCGGATCGAGGAAAAGCGGAAGCGGACCTACGAGACA | VP64-SV40-P65-RTA |
| | TTCAAGAGCATCATGAAGAAGTCCCCCTTCAGCGGCCCCACCGACCCTAGACCTCCACCTAGAAGAATCGCCGTGCCCAGCAGATCCAGCGCCAGCGTGCCAAAACCTGCCCCCCAGCC | |
| | TTACCCCTTCACCAGCAGCCTGAGCACCATCAACTACGACGAGTTCCCTACCATGGTGTTCCCCAGCGGCCAGATCTCTCAGGCCTCTGCTCTGGCTCCAGCCCCTCCTCAGGTGCTGC | |
| | CTCAGGCTCCTGCTCCTGCACCAGCTCCAGCCATGGTGTCTGCACTGGCTCAGGCACCAGCACCCGTGCCTGTGCTGGCTCCTGGACCTCCACAGGCTGTGGCTCCACCAGCCCCTAAA | |
| | CCTACACAGGCCGGCGAGGGCACACTGTCTGAAGCTCTGCTGCAGCTGCAGTTCGACGACGAGGATCTGGGAGCCCTGCTGGGAAACAGCACCGATCCTGCCGTGTTCACCGACCTGGC | |
| | CAGCGTGGACAACAGCGAGTTCCAGCAGCTGCTGAACCAGGGCATCCCTGTGGCCCCTCACACCACCGAGCCCATGCTGATGGAATACCCCGAGGCCATCACCCGGCTCGTGACAGGCG | |
| | CTCAGAGGCCTCCTGATCCAGCTCCTGCCCCTCTGGGAGCACCAGGCCTGCCTAATGGACTGCTGTCTGGCGACGAGGACTTCAGCTCTATCGCCGATATGGATTTCTCAGCCTTGCTG | |
| | GGCTCTGGCAGCGGCAGCCGGGATTCCAGGGAAGGGATGTTTTTGCCGAAGCCTGAGGCCGGCTCCGCTATTAGTGACGTGTTTGAGGGCCGCGAGGTGTGCCAGCCAAAACGAATCCG | |
| | GCCATTTCATCCTCCAGGAAGTCCATGGGCCAACCGCCCACTCCCCGCCAGCCTCGCACCAACACCAACCGGTCCAGTACATGAGCCAGTCGGGTCACTGACCCCGGCACCAGTCCCTC | |
| | AGCCACTGGATCCAGCGCCCGCAGTGACTCCCGAGGCCAGTCACCTGTTGGAGGATCCCGATGAAGAGACGAGCCAGGCTGTCAAAGCCCTTCGGGAGATGGCCGATACTGTGATTCCC | |
| | CAGAAGGAAGAGGCTGCAATCTGTGGCCAAATGGACCTTTCCCATCCGCCCCCAAGGGGCCATCTGGATGAGCTGACAACCACACTTGAGTCCATGACCGAGGATCTGAACCTGGACTC | |
| | ACCCCTGACCCCGGAATTGAACGAGATTCTGGATACCTTCCTGAACGACGAGTGCCTCTTGCATGCCATGCATATCAGCACAGGACTGTCCATCTTCGACACATCTCTGTTTTGA | |
| 88 | SPGIRRLDALISTSLYKKAGYKEASGSGRADALDDFDLDMLGSDALDDFDLDMLGSDALDDFDLDMLGSDALDDFDLDMLINSRSSGSPKKKRKVGSQYLPDTDDRHRIEEKRKRTYET | TAD [Synthetic] |
| | FKSIMKKSPFSGPTDPRPPPRRIAVPSRSSASVPKPAPQPYPFTSSLSTINYDEFPTMVFPSGQISQASALAPAPPQVLPQAPAPAPAPAMVSALAQAPAPVPVLAPGPPQAVAPPAPK | VPR comprises a |
| | PTQAGEGTLSEALLQLQFDDEDLGALLGNSTDPAVFTDLASVDNSEFQQLLNQGIPVAPHTTEPMLMEYPEAITRLVTGAQRPPDPAPAPLGAPGLPNGLLSGDEDFSSIADMDFSALL | VP64-SV40-P65-RTA |
| | GSGSGSRDSREGMFLPKPEAGSAISDVFEGREVCQPKRIRPFHPPGSPWANRPLPASLAPTPTGPVHEPVGSLTPAPVPQPLDPAPAVTPEASHLLEDPDEETSQAVKALREMADTVIP | |
| | QKEEAAICGQMDLSHPPPRGHLDELTTTLESMTEDLNLDSPLTPELNEILDTFLNDECLLHAMHISTGLSIFDTSLF | |
| | Linkers | |
| 89 | SGSETPGTSESATPES | XTEN linker |
| | | [Synthetic] |
| 90 | SGGS | linker |
| | | [Synthetic] |
| 91 | (SGGS)n | linker |
| | | [Synthetic] |
| 92 | (SGGS)n | linker |
| | | [Synthetic] |
| 93 | (GGGS)n | linker |
| | | [Synthetic] |
| 94 | GGGGS | linker |
| | | [Synthetic] |
| 95 | (GGGGS)n | linker |
| | | [Synthetic] |
| 96 | (SGGS)2-SGSETPGTSESATPES-(SGGS)2 | linker |
| | | [Synthetic] |
| 97 | (G)n | linker |
| | | [Synthetic] |
| 98 | (SGGS)n-SGSETPGTSESATPES-(SGGS)n | linker |
| | | [Synthetic] |
| 99 | (EAAAK)n | linker |
| | | [Synthetic] |
| 100 | (EAAAK)n | linker |
| | | [Synthetic] |
| 101 | (GGS)n | linker |
| | | [Synthetic] |
| 102 | (GGS)n | linker |
| | | [Synthetic] |
| 103 | SGGS(GGS)n | linker |
| | | [Synthetic] |
| 104 | SGGSSGGSSGGSSGGSSGGSSGGSSGGSSGGSSGGSSGGSSGGSSGGSSGGSSGGSSGGSSGSETPGTSESATPESSGGSSGGSSGGSSGGSSGGSSGGSSGGSSGGSSGGSSGGSSGG | linker |
| | SSGGSSGGSSGGSSGGS | [Synthetic] |
| 105 | SGGSSGGSSGGSSGGSSGGSSGGSSGGSSGGSSGGSSGGSSGSETPGTSESATPESSGGSSGGSSGGSSGGSSGGSSGGSSGGSSGGSSGGSSGGS | linker |
| | | [Synthetic] |
| 106 | SGGSSGGSSGSETPGTSESATPESSGGSSGGSSGGSSGGS | linker |
| | | [Synthetic] |
| 107 | SGGSSGGSSGSETPGTSESATPESSGGSSGGSSGGSSGGSSGSETPGTSESATPESSGGSSGGS | linker |
| | | [Synthetic] |
| 108 | PGSPAGSPTSTEEGTSESATPESGPGTSTEPSEGSAPGSPAGSPTSTEEGTSTEPSEGSAPGTSTEPSEGSAPGTSESATPESGPGSEPATS | linker |
| | | [Synthetic] |
| 109 | SGGSSGGSSGSETPGTSESATPESSGGSSGGS | linker |
| | | [Synthetic] |
| 110 | GGSGGSPGSPAGSPTSTEEGTSESATPESGPGTSTEPSEGSAPGSPAGSPTSTEEGTSTEPSEGSAPGTSTEPSEGSAPGTSESATPESGPGSEPATSGGSGGS | linker |
| | | [Synthetic] |
| 111 | SGGSSGGSSGSETPGTSESATPES | linker |
| | | [Synthetic] |
| 112 | GGGGS | C-terminal linker |
| | | [Synthetic] |
| | Nuclear localization signals (NLS) | |
| 113 | PKKKRKV | NLS [Synthetic] |
| 114 | MDSLLMNRRKFLYQFKNVRWAKGRRETYLC | NLS [Synthetic] |
| | uracil glycosylase inhibitors (UGI) | |
| 115 | MTNLSDIIEKETGKQLVIQESILMLPEEVEEVIGNKPESDILVHTAYDESTDENVMLLTSDAPEYKPWALVIQDSNGENKIKML | UNGI_BPPB2 |
| | | [Bacillus phage |
| | | PBS2 |
| 116 | KGHLTRLGLEFFDQPAVPLARAFLGQVLVRRLPNGTELRGRIVETQAYLGPEDEAAHSRGGRQTPRNRGMFMKPGTLYVYITYGMYFCMNISSQGDGACVLLRALEPLEGLETMRQLRS | Truncated AAG |
| | TLRKGTASRVLKDRELCSGPSKLCQALAINKSFDQRDLAQDEAVWLERGPLEPSEPAVVAAARVGVGHAGEWARKPLRFYVRGSPWVSVVDRVAEQDTQA | nuclease (E125Q) |
| | | [H. sapiens] |
| 117 | DLASLRAQQIELASSVIREDRLDKDPPDLIAGAAVGFEQGGEVTRAAMVLLKYPSLELVEYKVARIATTMPYIPGFLSFREYPALLAAWEMLSQKPDLVFVDGHGISHPRRLGVASHFG | EndoV nuclease |
| | LLVDVPTIGVAKKRLCGKFEPLSSEPGALAPLMDKGEQLAWVWRSKARCNPLFIATGHRVSVDSALAWVQRCMKGYRLPEPTRWADAVASERPAFVRYTANQP | (D35A) |
| | | [Synthetic] |
| 118 | MASRGVNKVILVGNLGQDPEVRYMPNGGAVANITLATSESWRDKQTGETKEKTEWHRVVLFGKLAEVAGEYLRKGSQVYIEGALQTRKWTDQAGVEKYTTEVVVNVGGTMQMLGGRSQG | SSB [Erwinia |
| | GGASAGGQNGGSNNGWGQPQQPQGGNQFSGGAQQQARPQQQPQQNNAPANNEPPIDFDDDIP | tasmaniensis] |
| 119 | MAGAQDFVPHTADLAELAAAAGECRGCGLYRDATQAVFGAGGRSARIMMIGEQPGDKEDLAGLPFVGPAGRLLDRALEAADIDRDALYVTNAVKHFKFTRAAGGKRRIHKTPSRTEVVA | UdgX [Synthetic] |
| | CRPWLIAEMTSVEPDVVVLLGATAAKALLGNDFRVTQHRGEVLHVDDVPGDPALVATVHPSSLLRGPKEERESAFAGLVDDLRVAADVRP | |
| 120 | MIGQKTLYSFFSPSPARKRHAPSPEPAVQGTGVAGVPEESGDAAAIPAKKAPAGQEEPGTPPSSPLSAEQLDRIQRNKAAALLRLAARNVPVGFGESWKKHLSGEFGKPYFIKLMGFVA | UDG [Synthetic] |
| | EERKHYTVYPPPHQVFTWTQMCDIKDVKVVILGQEPYHGPNQAHGLCFSVQRPVPPPPSLENIYKELSTDIEDFVHPGHGDLSGWAKQGVLLLNAVLTVRAHQANSHKERGWEQFTDAV | |
| | VSWLNQNSNGLVFLLWGSYAQKKGSAIDRKRHHVLQTAHPSPLSVYRGFFGCRHFSKT [symbol] DWKEL | |
| | Gam protein | |
| 121 | AKPAKRIKSAAAAYVPQNRDAVITDIKRIGDLQREASRLETEMNDAIAEITEKFAARIAPIKTDIETLSKGVQGWCEANRDELTNGGKVKTANLVTGDVSWRVRPPSVSIRGMDAVMET | Gam |
| | LERLGLQRFIRTKQEINKEAILLEPKAVAGVAGITVKSGIEDFSIIPFEQEAGI | [bacteriophage |
| | | Mu] |
| | Base editors | |
| 122 | MSSETGPVAVDPTLRRRIEPHEFEVFFDPRELRKETCLLYEINWGGRHSIWRHTSQNTNKHVEVNFIEKFTTERYFCPNTRCSITWFLSWSPCGECSRAITEFLSRYPHVTLFIYIARL | xCas9(3.7)-BE3 |
| | YHHADPRNRQGLRDLISSGVTIQIMTEQESGYCWRNFVNYSPSNEAHWPRYPHLWVRLYVLELYCIILGLPPCLNILRRKQPQLTFFTIALQSCHYQRLPPHILWATGLKSGSETPGTS | [Synthetic] |
| | ESATPESDKKYSIGLAIGTNSVGWAVITDEYKVPSKKFKVLGNTDRHSIKKNLIGALLFDSGETAEATRLKRTARRRYTRRKNRICYLQEIFSNEMAKVDDSFFHRLEESFLVEEDKKH | |
| | ERHPIFGNIVDEVAYHEKYPTIYHLRKKLVDSTDKADLRLIYLALAHMIKFRGHFLIEGDLNPDNSDVDKLFIQLVQTYNQLFEENPINASGVDAKAILSARLSKSRRLENLIAQLPGE | |
| | KKNGLFGNLIALSLGLTPNFKSNFDLAEDTKLQLSKDTYDDDLDNLLAQIGDQYADLFLAAKNLSDAILLSDILRVNTEITKAPLSASMIKLYDEHHQDLTLLKALVRQQLPEKYKEIF | |
| | FDQSKNGYAGYIDGGASQEEFYKFIKPILEKMDGTEELLVKLNREDLLRKQRTFDNGIIPHQIHLGELHAILRRQEDFYPFLKDNREKIEKILTFRIPYYVGPLARGNSRFAWMTRKSE | |
| | ETITPWNFEKVVDKGASAQSFIERMTNFDKNLPNEKVLPKHSLLYEYFTVYNELTKVKYVTEGMRKPAFLSGDQKKAIVDLLFKTNRKVTVKQLKEDYFKKIECFDSVEISGVEDRFNA | |
| | SLGTYHDLLKIIKDKDFLDNEENEDILEDIVLTLTLFEDREMIEERLKTYAHLFDDKVMKQLKRRRYTGWGRLSRKLINGIRDKQSGKTILDFLKSDGFANRNFIQLIHDDSLTFKEDI | |
| | QKAQVSGQGDSLHEHIANLAGSPAIKKGILQTVKVVDELVKVMGRHKPENIVIEMARENQTTQKGQKNSRERMKRIEEGIKELGSQILKEHPVENTQLQNEKLYLYYLQNGRDMYVDQE | |
| | LDINRLSDYDVDHIVPQSFLKDDSIDNKVLTRSDKNRGKSDNVPSEEVVKKMKNYWRQLLNAKLITQRKFDNLTKAERGGLSELDKAGFIKRQLVETRQITKHVAQILDSRMNTKYDEN | |
| | DKLIREVKVITLKSKLVSDFRKDFQFYKVREINNYHHAHDAYLNAVVGTALIKKYPKLESEFVYGDYKVYDVRKMIAKSEQEIGKATAKYFFYSNIMNFFKTEITLANGEIRKRPLIET | |
| | NGETGEIVWDKGRDFATVRKVLSMPQVNIVKKTEVQTGGFSKESILPKRNSDKLIARKKDWDPKKYGGFDSPTVAYSVLVVAKVEKGKSKKLKSVKELLGITIMERSSFEKNPIDFLEA | |
| | KGYKEVKKDLIIKLPKYSLFELENGRKRMLASAGVLQKGNELALPSKYVNFLYLASHYEKLKGSPEDNEQKQLFVEQHKHYLDEIIEQISEFSKRVILADANLDKVLSAYNKHRDKPIR | |
| | EQAENIIHLFTLTNLGAPAAFKYFDTTIDRKRYTSTKEVLDATLIHQSITGLYETRIDLSQLGGDSGGSTNLSDIIEKETGKQLVIQESILMLPEEVEEVIGNKPESDILVHTAYDEST | |
| | DENVMLLTSDAPEYKPWALVIQDSNGENKIKMLSGGSPKKKRKV | |
| 123 | MSSETGPVAVDPTLRRRIEPHEFEVFFDPRELRKETCLLYEINWGGRHSIWRHTSQNTNKHVEVNFIEKFTTERYFCPNTRCSITWFLSWSPCGECSRAITEFLSRYPHVTLFIYIARL | xCas9(3.6)-BE3 |
| | YHHADPRNRQGLRDLISSGVTIQIMTEQESGYCWRNFVNYSPSNEAHWPRYPHLWVRLYVLELYCIILGLPPCLNILRRKQPQLTFFTIALQSCHYQRLPPHILWATGLKSGSETPGTS | [Synthetic] |
| | ESATPESDKKYSIGLAIGTNSVGWAVITDEYKVPSKKFKVLGNTDRHSIKKNLIGALLFDSGETAEATRLKRTARRRYTRRKNRICYLQEIFSNEMAKVDDSFFHRLEESFLVGEDKKH | |
| | ERHPIFGNIVDEVAYHEKYPTIYHLRKKLVDSTDKADLRLIYLALAHMIKFRGHFLIEGDLNPDNSDVDKLFIQLVQTYNQLFEENPINASGVDAKAILSARLAKSRRLENLIAQLPGE | |
| | KKNGLFGNLIALSLGLTPNFKSNFDLAEDTKLQLSKDTYDDDLDNLLAQIGDQYADLFLAAKNLSDAILLSDILRVNTEITKAPLSASMIKRYDEHHQDLTLLKALVRQQLPEKYKEIF | |
| | FDQSKNGYAGYIDGGASQEEFYKFIKPILEKMDGTEELLVKLNREDLLRKQRTFDNGIIPHQIHLGELHAILRRQEDFYPFLKDNREKIEKILTFRIPYYVGPLARGNSRFAWMTRKSE | |
| | ETITPWNFEKVVDKGASAQSFIERMTNFDKNLPNEKVLPKHSLLYEYFTVYNELTKVKYVTEGMRKPAFLSGDQKKAIVDLLFKTNRKVTVKQLKEDYFKKIECFDSVEISGVEDRFNA | |
| | SLGTYHDLLKIIKDKDFLDNEENEDILEDIVLTLTLFEDREMIEERLKTYAHLFDDKVMKQLKRRRYTGWGRLSRKLINGIRDKQSGKTILDFLKSDGFANRNFIQLIHDDSLTFKEDI | |
| | QKAQVSGQGDSLHEHIANLAGSPAIKKGILQTVKVVDELVKVMGRHKPENIVIEMARENQTTQKGQKNSRERMKRIEEGIKELGSQILKEHPVENTQLQNEKLYLYYLQNGRDMYVDQE | |
| | LDINRLSDYDVDHIVPQSFLKDDSIDNKVLTRSDKNRGKSDNVPSEEVVKKMKNYWRQLLNAKLITQRKFDNLTKAERGGLSELDKAGFIKRQLVETRQITKHVAQILDSRMNTKYDEN | |
| | DKLIREVKVITLKSKLVSDFRKDFQFYKVREINNYHHAHDAYLNAVVGTALIKKYPKLESEFVYGDYKVYDVRKMIAKSEQEIGKATAKYFFYSNIMNFFKTEITLANGEIRKRPLIET | |
| | NGETGEIVWDKGRDFATVRKVLSMPQVNIVKKTEVQTGGFSKESILPKRNSDKLIARKKDWDPKKYGGFDSPTVAYSVLVVAKVEKGKSKKLKSVKELLGITIMERSSFEKNPIDFLEA | |
| | KGYKEVKKDLIIKLPKYSLFELENGRKRMLASAGVLQKGNELALPSKYVNFLYLASHYEKLKGSPEDNEQKQLFVEQHKHYLDEIIEQISEFSKRVILADANLDKVLSAYNKHRDKPIR | |
| | EQAENIIHLFTLTNLGAPAAFKYFDTTIDRKRYTSTKEVLDATLIHQSITGLYETRIDISQLGGDSGGSTNLSDIIEKETGKQLVIQESILMLPEEVEEVIGNKPESDILVHTAYDEST | |
| | DENVMLLTSDAPEYKPWALVIQDSNGENKIKMLSGGSPKKKRKV | |
| 124 | MSSETGPVAVDPTLRRRIEPHEFEVFFDPRELRKETCLLYEINWGGRHSIWRTHSQNTNKHVEVNFIEKFTTERYFCPNTRCSITWFLSWSPCGECSRAITEFLSRYPHVTLFIYIARL | rAPOBEC1-XTEN- |
| | YHHADPRNRQGLRDLISSGVTIQIMTEQESGYCWRNFVNYSPSNEAHWPRYPHLWVRLYVLELYCIILGLPPCLNILRRKQPQLTFFTIALQSCHYQRLPPHILWATGLKSGSETPGTS | Cas9n-UGI-NLS |
| | ESATPESDKKYSIGLAIGTNSVGWAVITDEYKVPSKKFKVLGNTDRHSIKKNLIGALLFDSGETAEATRLKRTARRRYTRRKNRICYLQEIFSNEMAKVDDSFFHRLEESFLVEEDKKH | [Synthetic] |
| | ERHPIFGNIVDEVAYHEKYPTOYHLRKKLVDSTDKADLRLIYLALAHMIKFRGHFLIEGDLNPDNSDVDKLFIQLVQTYNQLFEENPINASGVDAKAILSARLSKSRRLENLIAQLPGE | |
| | KKNGLFGNLIALSLGLTPNFKSNFDLAEDAKLQLSKDTYDDDLDNLLAQIGDQYADLFLAAKNLSDAILLSDILRVNTEITKAPLSASMIKRYDEHHQDLTLLKALVRQQLPEKYKEIF | |
| | FDQSKNGYAGYIDGGASQEEFYKFIKPILEKMDGTEELLVKLNREDLLRKQRTFDNGSIPHQIHLGELHAILRRQEDFYPFLKDNREKIEKILTFRIPYYVGPLARGNSRFAWMTRKSE | |
| | ETITPWNFEEVVDKGASAQSFIERMTNFDKNLPNEKVLPKHSLLYEYFTVYNELTKVKYVTEGMRKPAFLSGEQKKAIVDLLFKTNRKVTVKQLKEDYFKKIECFDSVEISGVEDRFNA | |
| | SLGTYHDLLKIIKDKDFLDNEENEDILEDIVLTLTLFEDREMIEERLKTYAHLFDDKVMKQLKRRRYTGWGRLSRKLINGIRDKQSGKTILDFLKSDGFANRNFMQLIHDDSLTFKEDI | |
| | QKAQVSGQGDSLHEHIANLAGSPAIKKGILQTVKVVDELVKVMGRHKPENIVIEMARENQTTQKGQKNSRERMKRIEEGIKELGSQILKEHPVENTQLQNEKLYLYYLQNGRDMYVDQE | |
| | LDINRLSDYDVDHIVPQSFLKDDSIDNKVLTRSDKNRGKSDNVPSEEVVKKMKNYWRQLLNAKLITQRKFDNLTKAERGGLSELDKAGFIKRQLVETRQITKHVAQILDSRMNTKYDEN | |
| | DKLIREVKVITLKSKLVSDFRKDFQFYKVREINNYHHAHDAYLNAVVGTALIKKYPKLESEFVYGDYKVYDVRKMIAKSEQEIGKATAKYFFYSNIMNFFKTEITLANGEIRKRPLIET | |
| | NGETGEIVWDKGRDFATVRKVLSMPQVNIVKKTEVQTGGFSKESILPKRNSDKLIARKKDWDPKKYGGFDSPTVAYSVLVVAKVEKGKSKKLKSVKELLGITIMERSSFEKNPIDFLEA | |
| | KGYKEVKKDLIIKLPKYSLFELENGRKRMLASAGELQKGNELALPSKYVNFLYLASHYEKLKGSPEDNEQKQLFVEQHKHYLDEIIEQISEFSKRVILADANLDKVLSAYNKHRDKPIR | |
| | EQAENIIHLFTLTNLGAPAAFKYFDTTIDRKRYTSTKEVLDATLIHQSITGLYETRIDLSQLGGDSGGSTNLSDIIEKETGKQLVIQESILMLPEEVEEVIGNKPESDILVHTAYDEST | |
| | DENVMLLTSDAPEYKPWALVIQDSNGENKIKMLSGGSPKKKRKV | |
| 125 | MSSETGPVAVDPTLRRRIEPHEFEVFFDPRELRKETCLLYEINWGGRHSIWRHTSQNTNKHVEVNFIEKFTTERYFCPNTRCSITWFLSWSPCGECSRAITEFLSRYPHVTLFIYIARL | xCas9 3.7-BE4 |
| | YHHADPRNRQGLRDLISSGVTIQIMTEQESGYCWRNFVNYSPSNEAHWPRYPHLWVRLYVLELYCIILGLPPCLNILRRKQPQLTFFTIALQSCHYQRLPPHILWATGLKSGGSSGGSS | [Synthetic] |
| | GSETPGTSESATPESSGGSSGGSDKKYSIGLAIGTNSVGWAVITDEYKVPSKKFKVLGNTDRHSIKKNLIGALLFDSGETAEATRLKRTARRRYTRRKNRICYLQEIFSNEMAKVDDSF | |
| | FHRLEESFLVEEDKKHERHPIFGNIVDEVAYHEKYPTIYHLRKKLVDSTDKADLRLIYLALAHMIKFRGHFLIEGDLNPDNSDVDKLFIQLVQTYNQLFEENPINASGVDAKAILSARL | |
| | SKSRRLENLIAQLPGEKKNGLFGNLIALSLGLTPNFKSNFDLAEDTKLQLSKDTYDDDLDNLLAQIGDQYADLFLAAKNLSDAILLSDILRVNTEITKAPLSASMIKLYDEHHQDLTLL | |
| | KALVRQQLPEKYKEIFFDQSKNGYAGYIDGGASQEEFYKFIKPILEKMDGTEELLVKLNREDLLRKQRTFDNGIIPHQIHLGELHAILRRQEDFYPFLKDNREKIEKILTFRIPYYVGP | |
| | LARGNSRFAWMTRKSEETITPWNFEKVVDKGASAQSFIERMTNFDKNLPNEKVLPKHSLLYEYFTVYNELTKVKYVTEGMRKPAFLSGDQKKAIVDLLFKTNRKVTVKQLKEDYFKKIE | |
| | CFDSVEISGVEDRFNASLGTYHDLLKIIKDKDFLDNEENEDILEDIVLTLTLFEDREMIEERLKTYAHLFDDKVMKQLKRRRYTGWGRLSRKLINGIRDKQSGKTILDFLKSDGFANRN | |
| | FIQLIHDDSLTFKEDIQKAQVSGQGDSLHEHIANLAGSPAIKKGILQTVKVVDELVKVMGRHKPENIVIEMARENQTTQKGQKNSRERMKRIEEGIKELGSQILKEHPVENTQLQNEKL | |
| | YLYYLQNGRDMYVDQELDINRLSDYDVDHIVPQSFLKDDSIDNKVLTRSDKNRGKSDNV [symbol] YWRQLLNAKLITQRKFDNLTKAERGGLSELDKAGFIKRQLVETRQITKH | |
| | VAQILDSRMNTKYDENDKLIREVKVITLKSKLVSDFRKDFQFYKVREINNYHHAHDAYLNAVVGTALIKKYPKLESEFVYGDYKVYDVRKMIAKSEQEIGKATAKYFFYSNIMNFFKTE | |
| | ITLANGEIRKRPLIETNGETGEIVWDKGRDFATVRKVLSMPQVNIVKKTEVQTGGFSKESILPKRNSDKLIARKKDWDPKKYGGFDSPTVAYSVLVVAKVEKGKSKKLKSVKELLGITI | |
| | MERSSFEKNPIDFLEAKGYKEVKKDLIIKLPKYSLFELENGRKRMLASAGVLQKGNELALPSKYVNFLYLASHYEKLKGSPEDNEQKQLFVEQHKHYLDEIIEQISEFSKRVILADANL | |
| | DKVLSAYNKHRDKPIREQAENIIHLFTLTNLGAPAAFKYFDTTIDRKRYTSTKEVLDATLIHQSITGLYETRIDLSQLGGDSGGSGGSGGSTNLSDIIEKETGKQLVIQESILMLPEEV | |
| | EEVIGNKPESDILVHTAYDESTDENVMLLTSDAPEYKPWALVIQDSNGENKIKMLSGGSGGSGGSTNLSDIIEKETGKQLVIQESILMLPEEVEEVIGNKPESDILVHTAYDESTDENV | |
| | MLLTSDAPEYKPWALVIQDSNGENKIKMLSGGSPKKKRK | |
| 126 | MAKPAKRIKSAAAAYVPQNRDAVITDIKRIGDLQREASRLETEMNDAIAEITEKFAARIAPIKTDIETLSKGVQGWCEANRDELTNGGKVKTANLVTGDVSWRVRPPSVSIRGMDAVME | BE4-Gam |
| | TLERLGLQRFIRTKQEINKEAILLEPKAVAGVAGITVKSGIEDFSIIPFEQEAGISGSETPGTSESATPESSSETGPVAVDPTLRRRIEPHEFEVFFDPRELRKETCLLYEINWGGRHS | [Synthetic] |
| | IWRHTSQNTNKHVEVNFIEKFTTERYFCPNTRCSITWFLSWSPCGECSRAITEFLSRYPHVTLFIYIARLYHHADPRNRQGLRDLISSGVTIQIMTEQESGYCWRNFVNYSPSNEAHWP | |
| | RYPHLWVRLYVLELYCIILGLPPCLNILRRKQPQLTFFTIALQSCHYQRLPPHILWATGLKSGGSSGGSSGSETPGTSESATPESSGGSSGGSDKKYSIGLAIGTNSVGWAVITDEYKV | |
| | PSKKFKVLGNTDRHSIKKNLIGALLFDSGETAEATRLKRTARRRYTRRKNRICYLQEIFSNEMAKVDDSFFHRLEESFLVEEDKKHERHPIFGNIVDEVAYHEKYPTIYHLRKKLVDST | |
| | DKADLRLIYLALAHMIKFRGHFLIEGDLNPDNSDVDKLFIQLVQTYNQLFEENPINASGVDAKAILSARLSKSRRLENLIAQLPGEKKNGLFGNLIALSLGLTPNFKSNFDLAEDAKLQ | |
| | LSKDTYDDDLDNLLAQIGDQYADLFLAAKNLSDAILLSDILRVNTEITKAPLSASMIKRYDEHHQDLTLLKALVRQQLPEKYKEIFFDQSKNGYAGYIDGGASQEEFYKFIKPILEKMD | |
| | GTEELLVKLNREDLLRKQRTFDNGSIPHQIHLGELHAILRRQEDFYPFLKDNREKIEKILTFRIPYYVGPLARGNSRFAWMTRKSEETITPWNFEEVVDKGASAQSFIERMTNFDKNLP | |
| | NEKVLPKHSLLYEYFTVYNELTKVKYVTEGMRKPAFLSGEQKKAIVDLLFKTNRKVTVKQLKEDYFKKIECFDSVEISGVEDRFNASLGTYHDLLKIIKDKDFLDNEENEDILEDIVLT | |
| | LTLFEDREMIEERLKTYAHLFDDKVMKQLKRRRYTGWGRLSRKLINGIRDKQSGKTILDFLKSDGFANRNFMQLIHDDSLTFKEDIQKAQVSGQGDSLHEHIANLAGSPAIKKGILQTV | |
| | KVVDELVKVMGRHKPENIVIEMARENQTTQKGQKNSRERMKRIEEGIKELGSQILKEHPVENTQLQNEKLYLYYLQNGRDMYVDQELDINRLSDYDVDHIVPQSFLKDDSIDNKVLTRS | |
| | DKNRGKSDNVPSEEVVKKMKNYWRQLLNAKLITQRKFDNLTKAERGGLSELDKAGFIKRQLVETRQITKHVAQILDSRMNTKYDENDKLIREVKVITLKSKLVSDFRKDFQFYKVREIN | |
| | NYHHAHDAYLNAVVGTALIKKYPKLESEFVYGDYKVYDVRKMIAKSEQEIGKATAKYFFYSNIMNFFKTEITLANGEIRKRPLIETNGETGEIVWDKGRDFATVRKVLSMPQVNIVKKT | |
| | EVQTGGFSKESILPKRNSDKLIARKKDWDPKKYGGFDSPTVAYSVLVVAKVEKGKSKKLKSVKELLGITIMERSSFEKNPIDFLEAKGYKEVKKDLIIKLPKYSLFELENGRKRMLASA | |
| | GELQKGNELALPSKYVNFLYLASHYEKLKGSPEDNEQKQLFVEQHKHYLDEIIEQISEFSKRVILADANLDKVLSAYNKHRDKPIREQAENIIHLFTLTNLGAPAAFKYFDTTIDRKRY | |
| | TSTKEVLDATLIHQSITGLYETRIDLSQLGGDSGGSGGSGGSTNLSDIIEKETGKQLVIQESILMLPEEVEEVIGNKPESDILVHTAYDESTDENVMLLTSDAPEYKPWALVIQDSNGE | |
| | NKIKMLSGGSGGSGGSTNLSDIIEKETGKQLVIQESILMLPEEVEEVIGNKPESDILVHTAYDESTDENVMLLTSDAPEYKPWALVIQDSNGENKIKMLSGGSPKKKRK | |
| 127 | MSEVEFSHEYWMRHALTLAKRAWDEREVPVGAVLVHNNRVIGEGWNRPIGRHDPTAHAEIMALRQGGLVMQNYRLIDATLYVTLEPCVMCAGAMIHSRIGRVVFGARDAKTGAAGSLMD | xCas9(3.7)-ABE |
| | VLHHPGMNHRVEITEGILADECAALLSDFFRMRRQEIKAQKKAQSSTDSGGSSGGSSGSETPGTSESATPESSGGSSGGSSEVEFSHEYWMRHALTLAKRARDEREVPVGAVLVLNNRV | [Synthetic] |
| | IGEGWNRAIGLHDPTAHAEIMALRQGGLVMQNYRLIDATLYVTFEPCVMCAGAMIHSRIGRVVFGVRNAKTGAAGSLMDVLH130YPGMNHRVEITEGILADECAALLCYFFRMPRQVF | |
| | NAQKKAQSSTDSGGSSGGSSGSETPGTSESATPESSGGSSGGSDKKYSIGLAIGTNSVGWAVITDEYKVPSKKFKVLGNTDRHSIKKNLIGALLFDSGETAEATRLKRTARRRYTRRKN | |
| | RICYLQEIFSNEMAKVDDSFFHRLEESFLVEEDKKHERHPIFGNIVDEVAYHEKYPTIYHLRKKLVDSTDKADLRLIYLALAHMIKFRGHFLIEGDLNPDNSDVDKLFIQLVQTYNQLF | |
| | EENPINASGVDAKAILSARLSKSRRLENLIAQLPGEKKNGLFGNLIALSLGLTPNFKSNFDLAEDTKLQLSKDTYDDDLDNLLAQIGDQYADLFLAAKNLSDAILLSDILRVNTEITKA | |
| | PLSASMIKLYDEHHQDLTLLKALVRQQLPEKYKEIFFDQSKNGYAGYIDGGASQEEFYKFIKPILEKMDGTEELLVKLNREDLLRKQRTFDNGIIPHQIHLGELHAILRRQEDFYPFLK | |
| | DNREKIEKILTFRIPYYVGPLARGNSRFAWMTRKSEETITPWNFEKVVDKGASAQSFIERMTNFDKNLPNEKVLPKHSLLYEYFTVYNELTKVKYVTEGMRKPAFLSGDQKKAIVDLLF | |
| | KTNRKVTVKQLKEDYFKKIECFDSVEISGVEDRFNASLGTYHDLLKIIKDKDFLDNEENEDILEDIVLTLTLFEDREMIEERLKTYAHLFDDKVMKQLKRRRYTGWGRLSRKLINGIRD | |
| | KQSGKTILDFLKSDGFANRNFIQLIHDDSLTFKEDIQKAQVSGQGDSLHEHIANLAGSPAIKKGILQTVKVVDELVKVMGRHKPENIVIEMARENQTTQKGQKNSRERMKRIEEGIKEL | |
| | GSQILKEHPVENTQLQNEKLYLYYLQNGRDMYVDQELDINRLSDYDVDHIVPQSFLKDDSIDNKVLTRSDKNRGKSDNVPSEEVVKKMKNYWRQLLNAKLITQRKFDNLTKAERGGLSE | |
| | LDKAGFIKRQLVETRQITKHVAQILDSRMNTKYDENDKLIREVKVITLKSKLVSDFRKDFQFYKVREINNYHHAHDAYLNAVVGTALIKKYPKLESEFVYGDYKVYDVRKMIAKSEQEI | |
| | GKATAKYFFYSNIMNFFKTEITLANGEIRKRPLIETNGETGEIVWDKGRDFATVRKVLSMPQVNIVKKTEVQTGGFSKESILPKRNSDKLIARKKDWDPKKYGGFDSPTVAYSVLVVAK | |
| | VEKGKSKKLKSVKELLGITIMERSSFEKNPIDFLEAKGYKEVKKDLIIKLPKYSLFELENGRKRMLASAGVLQKGNELALPSKYVNFLYLASHYEKLKGSPEDNEQKQLFVEQHKHYLD | |
| | EIIEQISEFSKRVILADANLDKVLSAYNKHRDKPIREQAENIIHLFTLTNLGAPAAFKYFDTTIDRKRYTSTKEVLDATLIHQSITGLYETRIDLSQLGGDEGADKRTADGSEFESPKK | |
| | KRKV | |
| 128 | MSEVEFSHEYWMRHALTLAKRAWDEREVPVGAVLVHNNRVIGEGWNRPIGRHDPTAHAEIMALRQGGLVMQNYRLIDATLYVTLEPCVMCAGAMIHSRIGRVVFGARDAKTGAAGSLMD | xCas9(3.6)-ABE |
| | VLHHPGMNHRVEITEGILADECAALLSDFFRMRRQEIKAQKKAQSSTDSGGSSGGSSGSETPGTSESATPESSGGSSGGSSEVEFSHEYWMRHALTLAKRARDEREVPVGAVLVLNNRV | [Synthetic] |
| | IGEGWNRAIGLHDPTAHAEIMALRQGGLVMQNYRLIDATLYVTFEPCVMCAGAMIHSRIGRVVFGVRNAKTGAAGSLMDVLHYPGMNHRVEITEGILADECAALLCYFFRMPRQVFNAQ | |
| | KKAQSSTDSGGSSGGSSGSETPGTSESATPESSGGSSGGSDKKYSIGLAIGTNSVGWAVITDEYKVPSKKFKVLGNTDRHSIKKNLIGALLFDSGETAEATRLKRTARRRYTRRKNRIC | |
| | YLQEIFSNEMAKVDDSFFHRLEESFLVGEDKKHERHPIFGNIVDEVAYHEKYPTIYHLRKKLVDSTDKADLRLIYLALAHMIKFRGHFLIEGDLNPDNSDVDKLFIQLVQTYNQLFEEN | |
| | PINASGVDAKAILSARLAKSRRLENLIAQLPGEKKNGLFGNLIALSLGLTPNFKSNFDLAEDTKLQLSKDTYDDDLDNLLAQIGDQYADLFLAAKNLSDAILLSDILRVNTEITKAPLS | |
| | ASMIKRYDEHHQDLTLLKALVRQQLPEKYKEIFFDQSKNGYAGYIDGGASQEEFYKFIKPILEKMDGTEELLVKLNREDLLRKQRTFDNGIIPHQIHLGELHAILRRQEDFYPFLKDNR | |
| | EKIEKILTFRIPYYVGPLARGNSRFAWMTRKSEETITPWNFEKVVDKGASAQSFIERMTNFDKNLPNEKVLPKHSLLYEYFTVYNELTKVKYVTEGMRKPAFLSGDQKKAIVDLLFKTN | |
| | RKVTVKQLKEDYFKKIECFDSVEISGVEDRFNASLGTYHDLLKIIKDKDFLDNEENEDILEDIVLTLTLFEDREMIEERLKTYAHLFDDKVMKQLKRRRYTGWGRLSRKLINGIRDKQS | |
| | GKTILDFLKSDGFANRNFIQLIHDDSLTFKEDIQKAQVSGQGDSLHEHIANLAGSPAIKKGILQTVKVVDELVKVMGRHKPENIVIEMARENQTTQKGQKNSRERMKRIEEGIKELGSQ | |
| | ILKEHPVENTQLQNEKLYLYYLQNGRDMYVDQELDINRLSDYDVDHIVPQSFLKDDSIDNKVLTRSDKNRGKSDNVPSEEVVKKMKNYWRQLLNAKLITQRKFDNLTKAERGGLSELDK | |
| | AGFIKRQLVETRQITKHVAQILDSRMNTKYDENDKLIREVKVITLKSKLVSDFRKDFQFYKVREINNYHHAHDAYLNAVVGTALIKKYPKLESEFVYGDYKVYDVRKMIAKSEQEIGKA | |
| | TAKYFFYSNIMNFFKTEITLANGEIRKRPLIETNGETGEIVWDKGRDFATVRKVLSMPQVNIVKKTEVQTGGFSKESILPKRNSDKLIARKKDWDPKKYGGFDSPTVAYSVLVVAKVEK | |
| | GKSKKLKSVKELLGITIMERSSFEKNPIDFLEAKGYKEVKKDLIIKLPKYSLFELENGRKRMLASAGVLQKGNELALPSKYVNFLYLASHYEKLKGSPEDNEQKQLFVEQHKHYLDEII | |
| | EQISEFSKRVILADANLDKVLSAYNKHRDKPIREQAENIIHLFTLTNLGAPAAFKYFDTTIDRKRYTSTKEVLDATLIHQSITGIYETRIDLSQLGGDEGADKRTADGSEFESPKKKRK | |
| | V | |
| 129 | MSEVEFSHEYWMRHALTLAKRAWDEREVPVGAVLVHNNRVIGEGWNRPIGRHDPTAHAEIMALRQGGLVMQNYRLIDATLYVTLEPCVMCAGAMIHSRIGRVVFGARDAKTGAAGSLMD | ABE7.10 |
| | VLHHPGMNHRVEITEGILADECAALLSDFFRMRRQEIKAQKKAQSSTDSGGSSGGSSGSETPGTSESATPESSGGSSGGSSEVEFSHEYWMRHALTLAKRARDEREVPVGAVLVLNNRV | [Synthetic] |
| | IGEGWNRAIGLHDPTAHAEIMALRQGGLVMQNYRLIDATLYVTFEPCVMCAGAMIHSRIGRVVFGVRNAKTGAAGSLMDVLHYPGMNHRVEITEGILADECAALLCYFFRMPRQVFNAQ | |
| | KKAQSSTDSGGSSGGSSGSETPGTSESATPESSGGSSGGSDKKYSIGLAIGTNSVGWAVITDEYKVPSKKFKVLGNTDRHSIKKNLIGALLFDSGETAEATRLKRTARRRYTRRKNRIC | |
| | YLQEIFSNEMAKVDDSFFHRLEESFLVEEDKKHERHPIFGNIVDEVAYHEKYPTIYHLRKKLVDSTDKADLRLIYLALAHMIKFRGHFLIEGDLNPDNSDVDKLFIQLVQTYNQLFEEN | |
| | PINASGVDAKAILSARLSKSRRLENLIAQLPGEKKNGLFGNLIALSLGLTPNFKSNFDLAEDAKLQLSKDTYDDDLDNLLAQIGDQYADLFLAAKNLSDAILLSDILRVNTEITKAPLS | |
| | ASMIKRYDEHHQDLTLLKALVRQQLPEKYKEIFFDQSKNGYAGYIDGGASQEEFYKFIKPILEKMDGTEELLVKLNREDLLRKQRTFDNGSIPHQIHLGELHAILRRQEDFYPFLKDNR | |
| | EKIEKILTFRIPYYVGPLARGNSRFAWMTRKSEETITPWNFEEVVDKGASAQSFIERMTNFDKNLPNEKVLPKHSLLYEYFTVYNELTKVKYVTEGMRKPAFLSGEQKKAIVDLLFKTN | |
| | RKVTVKQLKEDYFKKIECFDSVEISGVEDRFNASLGTYHDLLKIIKDKDFLDNEENEDILEDIVLTLTLFEDREMIEERLKTYAHLFDDKVMKQLKRRRYTGWGRLSRKLINGIRDKQS | |
| | GKTILDFLKSDGFANRNFMQLIHDDSLTFKEDIQKAQVSGQGDSLHEHIANLAGSPAIKKGILQTVKVVDELVKVMGRHKPENIVIEMARENQTTQKGQKNSRERMKRIEEGIKELGSQ | |
| | ILKEHPVENTQLQNEKLYLYYLQNGRDMYVDQELDINRLSDYDVDHIVPQSFLKDDSIDNKVLTRSDKNRGKSDNVPSEEVVKKMKNYWRQLLNAKLITQRKFDNLTKAERGGLSELDK | |
| | AGFIKRQLVETRQITKHVAQILDSRMNTKYDENDKLIREVKVITLKSKLVSDFRKDFQFYKVREINNYHHAHDAYLNAVVGTALIKKYPKLESEFVYGDYKVYDVRKMIAKSEQEIGKA | |
| | TAKYFFYSNIMNFFKTEITLANGEIRKRPLIETNGETGEIVWDKGRDFATVRKVLSMPQVNIVKKTEVQTGGFSKESILPKRNSDKLIARKKDWDPKKYGGFDSPTVAYSVLVVAKVEK | |
| | GKSKKLKSVKELLGITIMERSSFEKNPIDFLEAKGYKEVKKDLIIKLPKYSLFELENGRKRMLASAGELQKGNELALPSKYVNFLYLASHYEKLKGSPEDNEQKQLFVEQHKHYLDEII | |
| | EQISEFSKRVILADANLDKVLSAYNKHRDKPIREQAENIIHLFTLTNLGAPAAFKYFDTTIDRKRYTSTKEVLDATLIHQSITGLYETRIDLSQLGGDSGGSPKKKRKV | |
| 130 | MSSETGPVAVDPTLRRRIEPHEFEVFFDPRELRKETCLLYEINWGGRHSIWRHTSQNTNKHVEVNFIEKFTTERYFCPNTRCSITWFLSWSPCGECSRAITEFLSRYPHVTLFIYIARL | BE4 |
| | YHHADPRNRQGLRDLISSGVTIQIMTEQESGYCWRNFVNYSPSNEAHWPRYPHLWVRLYVLELYCIILGLPPCLNILRRKQPQLTFFTIALQSCHYQRLPPHILWATGLKSGGSSGGSS | [Synthetic] |
| | GSETPGTSESATPESSGGSSGGSDKKYSIGLAIGTNSVGWAVITDEYKVPSKKFKVLGNTDRHSIKKNLIGALLFDSGETAEATRLKRTARRRYTRRKNRICYLQEIFSNEMAKVDDSF | |
| | FHRLEESFLVEEDKKHERHPIFGNIVDEVAYHEKYPTIYHLRKKLVDSTDKADLRLIYLALAHMIKFRGHFLIEGDLNPDNSDVDKLFIQLVQTYNQLFEENPINASGVDAKAILSARL | |
| | SKSRRLENLIAQLPGEKKNGLFGNLIALSLGLTPNFKSNFDLAEDAKLQLSKDTYDDDLDNLLAQIGDQYADLFLAAKNLSDAILLSDILRVNTEITKAPLSASMIKRYDEHHQDLTLL | |
| | KALVRQQLPEKYKEIFFDQSKNGYAGYIDGGASQEEFYKFIKPILEKMDGTEELLVKLNREDLLRKQRTFDNGSIPHQIHLGELHAILRRQEDFYPFLKDNREKIEKILTFRIPYYVGP | |
| | LARGNSRFAWMTRKSEETITPWNFEEVVDKGASAQSFIERMTNFDKNLPNEKVLPKHSLLYEYFTVYNELTKVKYVTEGMRKPAFLSGEQKKAIVDLLFKTNRKVTVKQLKEDYFKKIE | |
| | CFDSVEISGVEDRFNASLGTYHDLLKIIKDKDFLDNEENEDILEDIVLTLTLFEDREMIEERLKTYAHLFDDKVMKQLKRRRYTGWGRLSRKLINGIRDKQSGKTILDFLKSDGFANRN | |
| | FMQLIHDDSLTFKEDIQKAQVSGQGDSLHEHIANLAGSPAIKKGILQTVKVVDELVKVMGRHKPENIVIEMARENQTTQKGQKNSRERMKRIEEGIKELGSQILKEHPVENTQLQNEKL | |
| | YLYYLQNGRDMYVDQELDINRLSDYDVDHIVPQSFLKDDSIDNKVLTRSDKNRGKSDNVPSEEVVKKMKNYWRQLLNAKLITQRKFDNLTKAERGGLSELDKAGFIKRQLVETRQITKH | |
| | VAQILDSRMNTKYDENDKLIREVKVITLKSKLVSDFRKDFQFYKVREINNYHHAHDAYLNAVVGTALIKKYPKLESEFVYGDYKVYDVRKMIAKSEQEIGKATAKYFFYSNIMNFFKTE | |
| | ITLANGEIRKRPLIETNGETGEIVWDKGRDFATVRKVLSMPQVNIVKKTEVQTGGFSKESILPKRNSDKLIARKKDWDPKKYGGFDSPTVAYSVLVVAKVEKGKSKKLKSVKELLGITI | |
| | MERSSFEKNPIDFLEAKGYKEVKKDLIIKLPKYSLFELENGRKRMLASAGELQKGNELALPSKYVNFLYLASHYEKLKGSPEDNEQKQLFVEQHKHYLDEIIEQISEFSKRVILADANL | |
| | DKVLSAYNKHRDKPIREQAENIIHLFTLTNLGAPAAFKYFDTTIDRKRYTSTKEVLDATLIHQSITGLYETRIDLSQLGGDSGGSGGSGGSTNLSDIIEKETGKQLVIQESILMLPEEV | |
| | EEVIGNKPESDILVHTAYDESTDENVMLLTSDAPEYKPWALVIQDSNGENKIKMLSGGSGGSGGSTNLSDIIEKETGKQLVIQESILMLPEEVEEVIGNKPESDILVHTAYDESTDENV | |
| | MLLTSDAPEYKPWALVIQDSNGENKIKMLSGGSPKKKRK | |
| 131 | ATGGACAAGAAGTACTCCATTGGGCTCGATATCGGCACAAACAGCGTCGGCTGGGCCGTCATTACGGACGAGTACAAGGTGCCGAGCAAAAAATTCAAAGTTCTGGGCAATACCGATCG | dCas9-VPR |
| | CCACAGCATAAAGAAGAACCTCATTGGCGCCCTCCTGTTCGACTCCGGGGAGACGGCCGAAGCCACGCGGCTCAAAAGAACAGCACGGCGCAGATATACCCGCAGAAAGAATCGGATCT | [Synthetic] |
| | GCTACCTGCAGGAGATCTTTAGTAATGAGATGGCTAAGGTGGATGACTCTTTCTTCCATAGGCTGGAGGAGTCCTTTTTGGTGGAGGAGGATAAAAAGCACGAGCGCCACCCAATCTTT | |
| | GGCAATATCGTGGACGAGGTGGCGTACCATGAAAAGTACCCAACCATATATCATCTGAGGAAGAAGCTTGTAGACAGTACTGATAAGGCTGACTTGCGGTTGATCTATCTCGCGCTGGC | |
| | GCATATGATCAAATTTCGGGGACACTTCCTCATCGAGGGGGACCTGAACCCAGACAACAGCGATGTCGACAAACTCTTTATCCAACTGGTTCAGACTTACAATCAGCTTTTCGAAGAGA | |
| | ACCCGATCAACGCATCCGGAGTTGACGCCAAAGCAATCCTGAGCGCTAGGCTGTCCAAATCCCGGCGGCTCGAAAACCTCATCGCACAGCTCCCTGGGGAGAAGAAGAACGGCCTGTTT | |
| | GGTAATCTTATCGCCCTGTCCCTCGGGCTGACCCCCAACTTTAAATCTAACTTCGACCTGGCCGAAGATACCAAGCTTCAACTGAGCAAAGACACCTACGATGATGATCTCGACAATCT | |
| | GCTGGCCCAGATCGGCGACCAGTACGCAGACCTTTTTTTGGCGGCAAAGAACCTGTCAGACGCCATTCTGCTGAGTGATATTCTGCGAGTGAACACGGAGATCACCAAAGCTCCGCTGA | |
| | GCGCTAGTATGATCAAGCTCTATGATGAGCACCACCAAGACTTGACTTTGCTGAAGGCCCTTGTCAGACAGCAACTGCCTGAGAAGTACAAGGAAATTTTCTTCGATCAGTCTAAAAAT | |
| | GGCTACGCCGGATACATTGACGGCGGAGCAAGCCAGGAGGAATTTTACAAATTTATTAAGCCCATCTTGGAAAAAATGGACGGCACCGAGGAGCTGCTGGTAAAGCTTAACAGAGAAGA | |
| | TCTGTTGCGCAAACAGCGCACTTTCGACAATGGAATCATCCCCCACCAGATTCACCTGGGCGAACTGCACGCTATCCTCAGGCGGCAAGAGGATTTCTACCCCTTTTTGAAAGATAACA | |
| | GGGAAAAGATTGAGAAAATCCTCACATTTCGGATACCCTACTATGTAGGCCCCCTCGCCCGGGGAAATTCCAGATTCGCGTGGATGACTCGCAAATCAGAAGAGACCATCACTCCCTGG | |
| | AACTTCGAGAAAGTCGTGGATAAGGGGGCCTCTGCCCAGTCCTTCATCGAAAGGATGACTAACTTTGATAAAAATCTGCCTAACGAAAAGGTGCTTCCTAAACACTCTCTGCTGTACGA | |
| | GTACTTCACAGTTTATAACGAGCTCACCAAGGTCAAATACGTCACAGAAGGGATGAGAAAGCCAGCATTCCTGTCTGGAGATCAGAAGAAAGCTATTGTGGACCTCCTCTTCAAGACGA | |
| | ACCGGAAAGTTACCGTGAAACAGCTCAAAGAAGACTATTTCAAAAAGATTGAATGTTTCGACTCTGTTGAAATCAGCGGAGTGGAGGATCGCTTCAACGCATCCCTGGGAACGTATCAC | |
| | GATCTCCTGAAAATCATTAAAGACAAGGACTTCCTGGACAATGAGGAGAACGAGGACATTCTTGAGGACATTGTCCTCACCCTTACGTTGTTTGAAGATAGGGAGATGATTGAAGAACG | |
| | CTTGAAAACTTACGCTCATCTCTTCGACGACAAAGTCATGAAGCAGCTCAAGAGGCGCCGATATACAGGATGGGGGCGGCTGTCAAGAAAACTGATCAATGGGATCCGAGACAAGCAGA | |
| | GTGGAAAGACAATCCTGGATTTTCTTAAGTCCGATGGATTTGCCAACCGGAACTTCATTCAGTTGATCCATGATGACTCTCTCACCTTTAAGGAGGACATCCAGAAAGCACAAGTTTCT | |
| | GGCCAGGGGGACAGTCTTCACGAGCACATCGCTAATCTTGCAGGTAGCCCAGCTATCAAAAAGGGAATACTGCAGACCGTTAAGGTCGTGGATGAACTCGTCAAAGTAATGGGAAGGCA | |
| | TAAGCCCGAGAATATCGTTATCGAGATGGCCCGAGAGAACCAAACCACCCAGAAGGGACAGAAGAACAGTAGGGAAAGGATGAAGAGGATTGAAGAGGGTATAAAAGAACTGGGGTCCC | |
| | AAATCCTTAAGGAACACCCAGTTGAAAACACCCAGCTTCAGAATGAGAAGCTCTACCTGTACTACCTGCAGAACGGCAGGGACATGTACGTGGATCAGGAACTGGACATCAATCGGCTC | |
| | TCCGACTACGACGTGGATCATATCGTGCCCCAGTCTTTTCTCAAAGATGATTCTATTGATAATAAAGTGTTGACAAGATCCGATAAAAATAGAGGGAAGAGTGATAACGTCCCCTCAGA | |
| | AGAAGTTGTCAAGAAAATGAAAAATTATTGGCGGCAGCTGCTGAACGCCAAACTGATCACACAACGGAAGTTCGATAATCTGACTAAGGCTGAACGAGGTGGCCTGTCTGAGTTGGATA | |
| | AAGCCGGTTTCATCAAAAGGCAGCTTGTTGAGACACGCCAGATCACCAAGCACGTGGCCCAAATTCTCGATTCACGCATGAACACCAAGTACGATGAAAATGACAAACTGATTCGAGAG | |
| | GTGAAAGTTATTACTCTGAAGTCTAAGCTGGTCTCAGATTTCAGAAAGGACTTTCAGTTTTATAAGGTGAGAGAGATCAACAATTACCACCATGCGCATGATGCCTACCTGAATGCAGT | |
| | GGTAGGCACTGCACTTATCAAAAAATATCCCAAGCTTGAATCTGAATTTGTTTACGGAGACTATAAAGTGTACGATGTTAGGAAAATGATCGCAAAGTCTGAGCAGGAAATAGGCAAGG | |
| | CCACCGCTAAGTACTTCTTTTACAGCAATATTATGAATTTTTTCAAGACCGAGATTACACTGGCCAATGGAGAGATTCGGAAGCGACCACTTATCGAAACAAACGGAGAAACAGGAGAA | |
| | ATCGTGTGGGACAAGGGTAGGGATTTCGCGACAGTCCGGAAGGTCCTGTCCATGCCGCAGGTGAACATCGTTAAAAAGACCGAAGTACAGACCGGAGGCTTCTCCAAGGAAAGTATCCT | |
| | CCCGAAAAGGAACAGCGACAAGCTGATCGCACGCAAAAAAGATTGGGACCCCAAGAAATACGGCGGATTCGATTCTCCTACAGTCGCTTACAGTGTACTGGTTGTGGCCAAAGTGGAGA | |
| | AAGGGAAGTCTAAAAAACTCAAAAGCGTCAAGGAACTGCTGGGCATCACAATCATGGAGCGATCAAGCTTCGAAAAAAACCCCATCGACTTTCTCGAGGCGAAAGGATATAAAGAGGTC | |
| | AAAAAAGACCTCATCATTAAGCTTCCCAAGTACTCTCTCTTTGAGCTTGAAAACGGCCGGAAACGAATGCTCGCTAGTGCGGGCGTGCTGCAGAAAGGTAACGAGCTGGCACTGCCCTC | |
| | TAAATACGTTAATTTCTTGTATCTGGCCAGCCACTATGAAAAGCTCAAAGGGTCTCCCGAAGATAATGAGCAGAAGCAGCTGTTCGTGGAACAACACAAACACTACCTTGATGAGATCA | |
| | TCGAGCAAATAAGCGAATTCTCCAAAAGAGTGATCCTCGCCGACGCTAACCTCGATAAGGTGCTTTCTGCTTACAATAAGCACAGGGATAAGCCCATCAGGGAGCAGGCAGAAAACATT | |
| | ATCCACTTGTTTACTCTGACCAACTTGGGCGCGCCTGCAGCCTTCAAGTACTTCGACACCACCATAGACAGAAAGCGGTACACCTCTACAAAGGAGGTCCTGGACGCCACACTGATTCA | |
| | TCAGTCAATTACGGGGCTCTATGAAACAAGAATCGACCTCTCTCAGCTCGGTGGAGACCCCCAAGAAGAAGAGGAAGGTGTCGCCAGGGATCCGTCGACTTGACGCGTTGATATCAACA | |
| | AGTTTGTACAAAAAAGCAGGCTACAAAGAGGCCAGCGGTTCCGGACGGGCTGACGCATTGGACGATTTTGATCTGGATATGCTGGGAAGTGACGCCCTCGATGATTTTGACCTTGACAT | |
| | GCTTGGTTCGGATGCCCTTGATGACTTTGACCTCGACATGCTCGGCAGTGACGCCCTTGATGATTTCGACCTGGACATGCTGATTAACTCTAGAAGTTCCGGATCTCCGAAAAAGAAAC | |
| | GCAAAGTTGGTAGCCAGTACCTGCCCGACACCGACGACCGGCACCGGATCGAGGAAAAGCGGAAGCGGACCTACGAGACATTCAAGAGCATCATGAAGAAGTCCCCCTTCAGCGGCCCC | |
| | ACCGACCCTAGACCTCCACCTAGAAGAATCGCCGTGCCCAGCAGATCCAGCGCCAGCGTCCGAAAAGGTGCCCCCCAGCCTTACCCCTTCACCAGCAGCCTGAGCACCATCAACTACGA | |
| | CGAGTTCCCTACCATGGTGTTCCCCAGCGGCCAGATCTCTCAGGCCTCTGCTCTGGCTCCAGCCCCTCCTCAGGTGCTGCCTCAGGCTCCTGCTCCTGCACCAGCTCCAGCCATGGTGT | |
| | CTGCACTGGCTCAGGCACCAGCACCCGTGCCTGTGCTGGCTCCTGGACCTCCACAGGCTGTGGCTCCACCAGCCCCTAAACCTACACAGGCCGGCGAGGGCACACTGTCTGAAGCTCTG | |
| | CTGCAGCTGCAGTTCGACGACGAGGATCTGGGAGCCCTGCTGGGAAACAGCACCGATCCTGCCGTGTTCACCGACCTGGCCAGCGTGGACAACAGCGAGTTCCAGCAGCTGCTGAACCA | |
| | GGGCATCCCTGTGGCCCCTCACACCACCGAGCCCATGCTGATGGAATACCCCGAGGCCATCACCCGGCTCGTGACAGGCGCTCAGAGGCCTCCTGATCCAGCTCCTGCCCCTCTGGGAG | |
| | CACCAGGCCTGCCTAATGGACTGCTGTCTGGCGACGAGGACTTCAGCTCTATCGCCGATATGGATTTCTCAGCCTTGCTGGGCTCTGGCAGCGGCAGCCGGGATTCCAGGGAAGGGATG | |
| | TTTTTGCCGAAGCCTGAGGCCGGCTCCGCTATTAGTGACGTGTTTGAGGGCCGCGAGGTGTGCCAGCCAAAACGAATCCGGCCATTTCATCCTCCAGGAAGTCCATGGGCCAACCGCCC | |
| | ACTCCCCGCCAGCCTCGCACCAACACCAACCGGTCCAGTACATGAGCCAGTCGGGTCACTGACCCCGGCACCAGTCCCTCAGCCACTGGATCCAGCGCCCGCAGTGACTCCCGAGGCCA | |
| | GTCACCTGTTGGAGGATCCCGATGAAGAGACGAGCCAGGCTGTCAAAGCCCTTCGGGAGATGGCCGATACTGTGATTCCCCAGAAGGAAGAGGCTGCAATCTGTGGCCAAATGGACCTT | |
| | TCCCATCCGCCCCCAAGGGGCCATCTGGATGAGCTGACAACCACACTTGAGTCCATGACCGAGGATCTGAACCTGGACTCACCCCTGACCCCGGAATTGAACGAGATTCTGGATACCTT | |
| | CCTGAACGACGAGTGCCTCTTGCATGCCATGCATATCAGCACAGGACTGTCCATCTTCGACACATCTCTGTTT | |
| 132 | MSEVEFSHEYWMRHALTLAKRAWDEREVPVGAVLVHNNRVIGEGWNRPIGRHDPTAHAEIMALRQGGLVMQNYRLIDATLYVTLEPCVMCAGAMIHSRIGRVVFGARDAKTGAAGSLMD | xCas9(3.6)-ABE |
| | VLHHPGMNHRVEITEGILADECAALLSDFFRMRRQEIKAQKKAQSSTDSGGSSGGSSGSETPGTSESATPESSGGSSGGSSEVEFSHEYWMRHALTLAKRARDEREVPVGAVLVLNNRV | [Synthetic] |
| | IGEGWNRAIGLHDPTAHAEIMALRQGGLVMQNYRLIDATLYVTFEPCVMCAGAMIHSRIGRVVFGVRNAKTGAAGSLMDVLHYPGMNHRVEITEGILADECAALLCYFFRMPRQVFNAQ | |
| | KKAQSSTDSGGSSGGSSGSETPGTSESATPESSGGSSGGSDKKYSIGLAIGTNSVGWAVITDEYKVPSKKFKVLGNTDRHSIKKNLIGALLFDSGETAEATRLKRTARRRYTRRKNRIC | |
| | YLQEIFSNEMAKVDDSFFHRLEESFLVGEDKKHERHPIFGNIVDEVAYHEKYPTIYHLRKKLVDSTDKADLRLIYLALAHMIKFRGHFLIEGDLNPDNSDVDKLFIQLVQTYNQLFEEN | |
| | PINASGVDAKAILSARLAKSRRLENLIAQLPGEKKNGLFGNLIALSLGLTPNFKSNFDLAEDTKLQLSKDTYDDDLDNLLAQIGDQYADLFLAAKNLSDAILLSDILRVNTEITKAPLS | |
| | ASMIKRYDEHHQDLTLLKALVRQQLPEKYKEIFFDQSKNGYAGYIDGGASQEEFYKFIKPILEKMDGTEELLVKLNREDLLRKQRTFDNGIIPHQIHLGELHAILRRQEDFYPFLKDNR | |
| | EKIEKILTFRIPYYVGPLARGNSRFAWMTRKSEETITPWNFEKVVDKGASAQSFIERMTNFDKNLPNEKVLPKHSLLYEYFTVYNELTKVKYVTEGMRKPAFLSGDQKKAIVDLLFKTN | |
| | RKVTVKQLKEDYFKKIECFDSVEISGVEDRFNASLGTYHDLLKIIKDKDFLDNEENEDILEDIVLTLTLFEDREMIEERLKTYAHLFDDKVMKQLKRRRYTGWGRLSRKLINGIRDKQS | |
| | GKTILDFLKSDGFANRNFIQLIHDDSLTFKEDIQKAQVSGQGDSLHEHIANLAGSPAIKKGILQTVKVVDELVKVMGRHKPENIVIEMARENQTTQKGQKNSRERMKRIEEGIKELGSQ | |
| | ILKEHPVENTQLQNEKLYLYYLQNGRDMYVDQELDINRLSDYDVDHIVPQSFLKDDSIDNKVLTRSDKNRGKSDNVPSEEVVKKMKNYWRQLLNAKLITQRKFDNLTKAERGGLSELDK | |
| | AGFIKRQLVETRQITKHVAQILDSRMNTKYDENDKLIREVKVITLKSKLVSDFRKDFQFYKVREINNYHHAHDAYLNAVVGTALIKKYPKLESEFVYGDYKVYDVRKMIAKSEQEIGKA | |
| | TAKYFFYSNIMNFFKTEITLANGEIRKRPLIETNGETGEIVWDKGRDFATVRKVLSMPQVNIVKKTEVQTGGFSKESILPKRNSDKLIARKKDWDPKKYGGFDSPTVAYSVLVVAKVEK | |
| | GKSKKLKSVKELLGITIMERSSFEKNPIDFLEAKGYKEVKKDLIIKLPKYSLFELENGRKRMLASAGVLQKGNELALPSKYVNFLYLASHYEKLKGSPEDNEQKQLFVEQHKHYLDEII | |
| | EQISEFSKRVILADANLDKVLSAYNKHRDKPIREQAENIIHLFTLTNLGAPAAFKYFDTTIDRKRYTSTKEVLDATLIHQSITGIYETRIDLSQLGGDEGADKRTADGSEFESPKKKRK | |
| | V | |
| 133 | MSSETGPVAVDPTLRRRIEPHEFEVFFDPRELRKETCLLYEINWGGRHSIWRHTSQNTNKHVEVNFIEKFTTERYFCPNTRCSITWFLSWSPCGECSRAITEFLSRYPHVTLFIYIARL | xCas9 3.6-BE4 |
| | YHHADPRNRQGLRDLISSGVTIQIMTEQESGYCWRNFVNYSPSNEAHWPRYPHLWVRLYVLELYCIILGLPPCLNILRRKQPQLTFFTIALQSCHYQRLPPHILWATGLKSGGSSGGSS | [Synthetic] |
| | GSETPGTSESATPESSGGSSGGSDKKYSIGLAIGTNSVGWAVITDEYKVPSKKFKVLGNTDRHSIKKNLIGALLFDSGETAEATRLKRTARRRYTRRKNRICYLQEIFSNEMAKVDDSF | |
| | FHRLEESFLVGEDKKHERHPIFGNIVDEVAYHEKYPTIYHLRKKLVDSTDKADLRLIYLALAHMIKFRGHFLIEGDLNPDNSDVDKLFIQLVQTYNQLFEENPINASGVDAKAILSARL | |
| | AKSRRLENLIAQLPGEKKNGLFGNLIALSLGLTPNFKSNFDLAEDTKLQLSKDTYDDDLDNLLAQIGDQYADLFLAAKNLSDAILLSDILRVNTEITKAPLSASMIKRYDEHHQDLTLL | |
| | KALVRQQLPEKYKEIFFDQSKNGYAGYIDGGASQEEFYKFIKPILEKMDGTEELLVKLNREDLLRKQRTFDNGIIPHQIHLGELHAILRRQEDFYPFLKDNREKIEKILTFRIPYYVGP | |
| | LARGNSRFAWMTRKSEETITPWNFEKVVDKGASAQSFIERMTNFDKNLPNEKVLPKHSLLYEYFTVYNELTKVKYVTEGMRKPAFLSGDQKKAIVDLLFKTNRKVTVKQLKEDYFKKIE | |
| | CFDSVEISGVEDRFNASLGTYHDLLKIIKDKDFLDNEENEDILEDIVLTLTLFEDREMIEERLKTYAHLFDDKVMKQLKRRRYTGWGRLSRKLINGIRDKQSGKTILDFLKSDGFANRN | |
| | FIQLIHDDSLTFKEDIQKAQVSGQGDSLHEHIANLAGSPAIKKGILQTVKVVDELVKVMGRHKPENIVIEMARENQTTQKGQKNSRERMKRIEEGIKELGSQILKEHPVENTQLQNEKL | |
| | YLYYLQNGRDMYVDQELDINRLSDYDVDHIVPQSFLKDDSIDNKVLTRSDKNRGKSDNVPSEEVVKKMKNYWRQLLNAKLITQRKFDNLTKAERGGLSELDKAGFIKRQLVETRQITKH | |
| | VAQILDSRMNTKYDENDKLIREVKVITLKSKLVSDFRKDFQFYKVREINNYHHAHDAYLNAVVGTALIKKYPKLESEFVYGDYKVYDVRKMIAKSEQEIGKATAKYFFYSNIMNFFKTE | |
| | ITLANGEIRKRPLIETNGETGEIVWDKGRDFATVRKVLSMPQVNIVKKTEVQTGGFSKESILPKRNSDKLIARKKDWDPKKYGGFDSPTVAYSVLVVAKVEKGKSKKLKSVKELLGITI | |
| | MERSSFEKNPIDFLEAKGYKEVKKDLIIKLPKYSLFELENGRKRMLASAGVLQKGNELALPSKYVNFLYLASHYEKLKGSPEDNEQKQLFVEQHKHYLDEIIEQISEFSKRVILADANL | |
| | DKVLSAYNKHRDKPIREQAENIIHLFTLTNLGAPAAFKYFDTTIDRKRYTSTKEVLDATLIHQSITGLYETRIDISQLGGDSGGSGGSGGSTNLSDIIEKETGKQLVIQESILMLPEEV | |
| | EEVIGNKPESDILVHTAYDESTDENVMLLTSDAPEYKPWALVIQDSNGENKIKMLSGGSGGSGGSTNLSDIIEKETGKQLVIQESILMLPEEVEEVIGNKPESDILVHTAYDESTDENV | |
| | MLLTSDAPEYKPWALVIQDSNGENKIKMLSGGSPKKKRK | |
| | Guide RNA | |
| 134 | MMMMMMMMNNNNNNNNNNNNXGG | Cas9 Target/ |
| | | guide RNA |
| | | [Synthetic] |
| 135 | NNNNNNNNNNNNXGG | Cas9 Target/ |
| | | guide RNA |
| | | [Synthetic] |
| 136 | MMMMMMMMMNNNNNNNNNNNXGG | Cas9 Target |
| | | [Synthetic] |
| 137 | NNNNNNNNNNNXGG | Cas9 Target |
| | | [Synthetic] |
| 138 | MMMMMMMMNNNNNNNNNNNNXXAGAAW | Cas9 Target |
| | | [Synthetic] |
| 139 | NNNNNNNNNNNNXXAGAAW | Cas9 Target |
| | | [Synthetic] |
| 140 | MMMMMMMMMNNNNNNNNNNNXXAGAAW | Cas9 Target |
| | | [Synthetic] |
| 141 | NNNNNNNNNNNXXAGAAW | Cas9 Target |
| | | [Synthetic] |
| 142 | MMMMMMMMNNNNNNNNNNNNXGGXG | Cas9 Target |
| | | [Synthetic] |
| 143 | NNNNNNNNNNNNXGGXG | Cas9 Target |
| | | [Synthetic] |
| 144 | MMMMMMMMMNNNNNNNNNNNXGGXG | Cas9 Target |
| | | [Synthetic] |
| 145 | NNNNNNNNNNNXGGXG | Cas9 Target |
| | | [Synthetic] |
| 146 | NNNNNNNNgtttttgtactctcaagatttaGAAAtaaatcttgcagaagctacaaagataaggcttcatgccgaaatcaacaccctgtcattttatggcagggtgttttcgttatttaa | Transcription |
| | TTTTTT | Terminator |
| | | [Synthetic] |
| 147 | NNNNNNNNNNNNNNNNNNgtttttgtactctcaGAAAtgcagaagctacaaagataaggcttcatgccgaaatcaacaccctgtcattttatggcagggtgttttcgttatttaaTTTT | Transcription |
| | TT | Terminator |
| | | [Synthetic] |
| 148 | NNNNNNNNNNNNNNNNNNNNgtttttgtactctcaGAAAtgcagaagctacaaagataaggcttcatgccgaaatcaacaccctgtcattttatggcagggtgtTTTTT | Transcription |
| | | Terminator |
| | | [Synthetic] |
| 149 | NNNNNNNNNNNNNNNNNNNNgttttagagctaGAAAtagcaagttaaaataaggctagtccgttatcaacttgaaaaagtggcaccgagtcggtgcTTTTTT | Transcription |
| | | Terminator |
| | | [Synthetic] |
| 150 | NNNNNNNNNNNNNNNNNNNNgttttagagctaGAAATAGcaagttaaaataaggctagtccgttatcaacttgaaaaagtgTTTTTTT | Transcription |
| | | Terminator |
| | | [Synthetic] |
| 151 | NNNNNNNNNNNNNNNNNNNNgttttagagctagAAATAGcaagttaaaataaggctagtccgttatcaTTTTTTTT | Transcription |
| | | Terminator |
| | | [Synthetic] |
| 152 | guuuuagagcuagaaauagcaaguuaaaauaaggcuaguccguuaucaacuugaaaaaguggcaccgagucggugcuuuuu | guide RNA |
| | | [Synthetic] |
| | Table 4 Additional Cas9 proteins | |
| 153 | MNKPYSIGXDIGTNSVGWSIITDDYKVPAKKMRVLGNTDKEYIKKNLIGALLFDGGNTAADRRLKRTARRRYTRRRNRILYLQEIFAEEMSKVDDSFFHRLEDSFLVEEDKRGSKYPIF | EAO78426.1 |
| | ATLQEEKDYHEKFSTIYHLRKELADKKEKADLRLIYIALAHIIKFRGHFLIEDDSFDVRNTDISKQYQDFLEIFNTTFENNDLLSQNVDVEAILTDKISKSAKKDRILAQYPNQKSTGI | [Streptococcus |
| | FAEFLKLIVGNQADFKKYFNLEDKTPLQFAKDSYDEDLENLLGQIGDEFADLFSAAKKLYDSVLLSGILTVIDLSTKAPLSASMIQRYDEHREDLKQLKQFVKASLPEKYQEIFADSSK | agalactiae] |
| | DGYAGYIEGKTNQEAFYKYLSKLLTKQEDSENFLEKIKNEDFLRKQRTFDNGSIPHQVHLTELKAIIRRQSEYYPFLKENQDRIEKILTFRIPYYIGPLAREKSDFAWMTRKTDDSIRP | |
| | WNFEDLVDKEKSAEAFIHRMTNNDFYLPEEKVLPKHSLIYEKFTVYNELTKVRYKNEQGETYFFDSNIKQEIFDGVFKEHRKVSKKKLLDFLAKEYEEFRIVDVIGLDKENKAFNASLG | |
| | TYHDLEKILDKDFLDNPDNESILEDIVQTLTLFEDREMIKKRLENYKDLFTESQLKKLYRRHYTGWGRLSAKLINGIRDKESQKTILDYLIDDGRSNRNFMQLINDDGLSFKSIISKAQ | |
| | AGSHSDNLKEVVGELAGSPAIKKGILQSLKIVDELVKVMGYEPEQIVVEMARENQTTNQGRRNSRQRYKLLDDGVKNLASDLNGNILKEYPTDNQALQNERLFLYYLQNGRDMYTGEAL | |
| | DIDNLSQYDIDHIIPQAFIKDDSIDNRVLVSSAKNRGKSDDVPSLEIVKDCKVFWKKLLDAKLMSQRKYDNLTKAERGGLTSDDKARFIQRQLVETRQITKHVARILDERFNNELDSKG | |
| | RRIRKVKIVTLKSNLVSNFRKEFGFYKIREVNNYHHAHDAYLNAVVAKAILTKYPQLEPEFVYGDYPKYNSYKTRKSATEKLFFYSNIMNFFKTKVTLADGTVVVKDDIEVNNDTGEIV | |
| | WDKKKHFATVRKVLSYPQNNIVKKTEIQTGGFSKESILAHGNSDKLIPRKTKDIYLDPKKYGGFDSPIVAYSVLVVADIKKGKAQKLKTVTELLGITIMERSRFEKNPSAFLESKGYLN | |
| | IRADKLIILPKYSLFELENGRRRLLASAGELQKGNELALPTQFMKFLYLASRYNESKGKPEEIEKKQEFVNQHVSYFDDILQLINDFSKRVILADANLEKINKLYQDNKENISVDELAN | |
| | NIINLFTFTSLGAPAAFKFFDKIVDRKRYTSTKEVLNSTLIHQSITGLYETRIDLGKLGED | |
| 154 | GAASMDKKYSIGLAIGTNSVGWAVITDEYKVPSKKFKVLGNTDRHSIKKNLIGALLFDSGETAEATRLKRTARRRYTRRKNRICYLQEIFSNEMAKVDDSFFHRLEESFLVEEDKKHER | 4UN5_B |
| | HPIFGNIVDEVAYHEKYPTIYHLRKKLVDSTDKADLRLIYLALAHMIKFRGHFLIEGDLNPDNSDVDKLFIQLVQTYNQLFEENPINASGVDAKAILSARLSKSRRLENLIAQLPGEKK | [Synthetic] |
| | NGLFGNLIALSLGLTPNEKSNFDLAEDAKLQLSKDTYDDDLDNLLAQIGDQYADLFLAAKNLSDAILLSDILRVNTEITKAPLSASMIKRYDEHHQDLTLLKALVRQQLPEKYKEIFFD | |
| | QSKNGYAGYIDGGASQEEFYKFIKPILEKMDGTEELLVKLNREDLLRKQRTFDNGSIPHQIHLGELHAILRRQEDFYPFLKDNREKIEKILTFRIPYYVGPLARGNSRFAWMTRKSEET | |
| | ITPWNFEEVVDKGASAQSFIERMTNFDKNLPNEKVLPKHSLLYEYFTVYNELTKVKYVTEGMRKPAFLSGEQKKAIVDLLFKTNRKVTVKQLKEDYFKKIECFDSVEISGVEDRFNASL | |
| | GTYHDLLKIIKDKDFLDNEENEDILEDIVLTLTLFEDREMIEERLKTYAHLFDDKVMKQLKRRRYTGWGRLSRKLINGIRDKQSGKTILDFLKSDGFANRNFMQLIHDDSLTFKEDIQK | |
| | AQVSGQGDSLHEHIANLAGSPAIKKGILQTVKVVDELVKVMGRHKPENIVIEMARENQTTQKGQKNSRERMKRIEEGIKELGSQILKEHPVENTQLQNEKLYLYYLQNGRDMYVDQELD | |
| | INRLSDYDVDAIVPQSFLKDDSIDNKVLTRSDKNRGKSDNVPSEEVVKKMKNYWRQLLNAKLITQRKFDNLTKAERGGLSELDKAGFIKRQLVETRQITKHVAQILDSRMNTKYDENDK | |
| | LIREVKVITLKSKLVSDFRKDFQFYKVREINNYHHAHDAYLNAVVGTALIKKYPKLESEFVYGDYKVYDVRKMIAKSEQEIGKATAKYFFYSNIMNFFKTEITLANGEIRKRPLIETNG | |
| | ETGEIVWDKGRDFATVRKVLSMPQVNIVKKTEVQTGGFSKESILPKRNSDKLIARKKDWDPKKYGGFDSPTVAYSVLVVAKVEKGKSKKLKSVKELLGITIMERSSFEKNPIDFLEAKG | |
| | YKEVKKDLIIKLPKYSLFELENGRKRMLASAGELQKGNELALPSKYVNFLYLASHYEKLKGSPEDNEQKQLFVEQHKHYLDEIIEQISEFSKRVILADANLDKVLSAYNKHRDKPIREQ | |
| | AENIIHLFTLTNLGAPAAFKYFDTTIDRKRYTSTKEVLDATLIHQSITGLYETRIDLSQLGGD | |
| 155 | GSHMKRNYILGLDIGITSVGYGIIDYETRDVIDAGVRLFKEANVENNEGRRSKRGARRLKRRRRHRIQRVKKLLFDYNLLTDHSELSGINPYEARVKGLSQKLSEEEFSAALLHLAKRR | 5AXW_A |
| | GVHNVNEVEEDTGNELSTKEQISRNSKALEEKYVAELQLERLKKDGEVRGSINRFKTSDYVKEAKQLLKVQKAYHQLDQSFIDTYIDLLETRRTYYEGPGEGSPFGWKDIKEWYEMLMG | [Staphylococcus |
| | HCTYFPEELRSVKYAYNADLYNALNDLNNLVITRDENEKLEYYEKFQIIENVFKQKKKPTLKQIAKEILVNEEDIKGYRVTSTGKPEFTNLKVYHDIKDITARKEIIENAELLDQIAKI | Aureus] |
| | LTIYQSSEDIQEELTNLNSELTQEEIEQISNLKGYTGTHNLSLKAINLILDELWHTNDNQIAIFNRLKLVPKKVDLSQQKEIPTTLVDDFILSPVVKRSFIQSIKVINAIIKKYGLPND | |
| | IIIELAREKNSKDAQKMINEMQKRNRQTNERIEEIIRTTGKENAKYLIEKIKLHDMQEGKCLYSLEAIPLEDLLNNPFNYEVDHIIPRSVSFDNSFNNKVLVKQEEASKKGNRTPFQYL | |
| | SSSDSKISYETFKKHILNLAKGKGRISKTKKEYLLEERDINRFSVQKDFINRNLVDTRYATRGLMNLLRSYFRVNNLDVKVKSINGGFTSFLRRKWKFKKERNKGYKHHAEDALIIANA | |
| | DFIFKEWKKLDKAKKVMENQMFEEKQAESMPEIETEQEYKEIFITPHQIKHIKDFKDYKYSHRVDKKPNRELINDTLYSTRKDDKGNTLIVNNLNGLYDKDNDKLKKLINKSPEKLLMY | |
| | HHDPQTYQKLKLIMEQYGDEKNPLYKYYEETGNYLTKYSKKDNGPVIKKIKYYGNKLNAHLDITDDYPNSRNKVVKLSLKPYRFDVYLDNGVYKFVTVKNLDVIKKENYYEVNSKAYEE | |
| | AKKLKKISNQAEFIASFYNNDLIKINGELYRVIGVNNDLLNRIEVNMIDITYREYLENMNDKRPPRIIKTIASKTQSIKKYSTDILGNLYEVKSKKHPQIIKKG | |
| 156 | MDKKYSIGLAIGTNSVGWAVITDEYKVPSKKFKVLGNTDRHSIKKNLIGALLFDSGETAEATRLKRTARRRYTRRKNRICYLQEIFSNEMAKVDDSFFHRLEESFLVEEDKKHERHPIF | AKA60242.1 |
| | GNIVDEVAYHEKYPTIYHLRKKLVDSTDKADLRLIYLALAHMIKFRGHFLIEGDLNPDNSDVDKLFIQLVQTYNQLFEENPINASGVDAKAILSARLSKSRRLENLIAQLPGEKKNGLF | [Synthetic] |
| | GNLIALSLGLTPNFKSNFDLAEDAKLQLSKDTYDDDLDNLLAQIGDQYADLFLAAKNLSDAILLSDILRVNTEITKAPLSASMIKRYDEHHQDLTLLKALVRQQLPEKYKEIFFDQSKN | |
| | GYAGYIDGGASQEEFYKFIKPILEKMDGTEELLVKLNREDLLRKQRTFDNGSIPHQIHLGELHAILRRQEDFYPFLKDNREKIEKILTFRIPYYVGPLARGNSRFAWMTRKSEETITPW | |
| | NFEEVVDKGASAQSFIERMTNFDKNLPNEKVLPKHSLLYEYFTVYNELTKVKYVTEGMRKPAFLSGEQKKAIVDLLFKTNRKVTVKQLKEDYFKKIECFDSVEISGVEDRFNASLGTYH | |
| | DLLKIIKDKDFLDNEENEDILEDIVLTLTLFEDREMIEERLKTYAHLFDDKVMKQLKRRRYTGWGRLSRKLINGIRDKQSGKTILDFLKSDGFANRNFMQLIHDDSLTFKEDIQKAQVS | |
| | GQGDSLHEHIANLAGSPAIKKGILQTVKVVDELVKVMGRHKPENIVIEMARENQTTQKGQKNSRERMKRIEEGIKELGSQILKEHPVENTQLQNEKLYLYYLQNGRDMYVDQELDINRL | |
| | SDYDVDAIVPQSFLKDDSIDNKVLTRSDKNRGKSDNVPSEEVVKKMKNYWRQLLNAKLITQRKFDNLTKAERGGLSELDKAGFIKRQLVETRQITKHVAQILDSRMNTKYDENDKLIRE | |
| | VKVITLKSKLVSDFRKDFQFYKVREINNYHHAHDAYLNAVVGTALIKKYPKLESEFVYGDYKVYDVRKMIAKSEQEIGKATAKYFFYSNIMNFFKTEITLANGEIRKRPLIETNGETGE | |
| | IVWDKGRDFATVRKVLSMPQVNIVKKTEVQTGGFSKESILPKRNSDKLIARKKDWDPKKYGGFDSPTVAYSVLVVAKVEKGKSKKLKSVKELLGITIMERSSFEKNPIDFLEAKGYKEV | |
| | KKDLIIKLPKYSLFELENGRKRMLASAGELQKGNELALPSKYVNFLYLASHYEKLKGSPEDNEQKQLFVEQHKHYLDEIIEQISEFSKRVILADANLDKVLSAYNKHRDKPIREQAENI | |
| | IHLFTLTNLGAPAAFKYFDTTIDRKRYTSTKEVLDATLIHQSITGLYETRIDLSQLGGD | |
| 157 | MDKKYSIGLDIGTNSVGWAVITDEYKVPSKKFKVLGNTDRHSIKKNLIGALLFDSGETAEATRLKRTARRRYTRRKNRICYLQEIFSNEMAKVDDSFFHRLEESFLVEEDKKHERHPIF | AKS40380.1 |
| | GNIVDEVAYHEKYPTIYHLRKKLVDSTDKADLRLIYLALAHMIKFRGHFLIEGDLNPDNSDVDKLFIQLVQTYNQLFEENPINASGVDAKAILSARLSKSRRLENLIAQLPGEKKNGLF | [Synthetic] |
| | GNLIALSLGLTPNFKSNFDLAEDAKLQLSKDTYDDDLDNLLAQIGDQYADLFLAAKNLSDAILLSDILRVNTEITKAPLSASMIKRYDEHHQDLTLLKALVRQQLPEKYKEIFFDQSKN | |
| | GYAGYIDGGASQEEFYKFIKPILEKMDGTEELLVKLNREDLLRKQRTFDNGSIPHQIHLGELHAILRRQEDFYPFLKDNREKIEKILTFRIPYYVGPLARGNSRFAWMTRKSEETITPW | |
| | NFEEVVDKGASAQSFIERMTNFDKNLPNEKVLPKHSLLYEYFTVYNELTKVKYVTEGMRKPAFLSGEQKKAIVDLLFKTNRKVTVKQLKEDYFKKIECFDSVEISGVEDRFNASLGTYH | |
| | DLLKIIKDKDFLDNEENEDILEDIVLTLTLFEDREMIEERLKTYAHLFDDKVMKQLKRRRYTGWGRLSRKLINGIRDKQSGKTILDFLKSDGFANRNFMQLIHDDSLTFKEDIQKAQVS | |
| | GQGDSLHEHIANLAGSPAIKKGILQTVKVVDELVKVMGRHKPENIVIEMARENQTTQKGQKNSRERMKRIEEGIKELGSQILKEHPVENTQLQNEKLYLYYLQNGRDMYVDQELDINRL | |
| | SDYDVDHIVPQSFLKDDSIDNKVLTRSDKNRGKSDNVPSEEVVKKMKNYWRQLLNAKLITQRKFDNLTKAERGGLSELDKAGFIKRQLVETRQITKHVAQILDSRMNTKYDENDKLIRE | |
| | VKVITLKSKLVSDFRKDFQFYKVREINNYHHAHDAYLNAVVGTALIKKYPKLESEFVYGDYKVYDVRKMIAKSEQEIGKATAKYFFYSNIMNFFKTEITLANGEIRKRPLIETNGETGE | |
| | IVWDKGRDFATVRKVLSMPQVNIVKKTEVQTGGFSKESILPKRNSDKLIARKKDWDPKKYGGFDSPTVAYSVLVVAKVEKGKSKKLKSVKELLGITIMERSSFEKNPIDFLEAKGYKEV | |
| | KKDLIIKLPKYSLFELENGRKRMLASAGELQKGNELALPSKYVNFLYLASHYEKLKGSPEDNEQKQLFVEQHKHYLDEIIEQISEFSKRVILADANLDKVLSAYNKHRDKPIREQAENI | |
| | IHLFTLTNLGAPAAFKYFDTTIDRKRYTSTKEVLDATLIHQSITGLYETRIDLSQLGGDPPKKKRKV | |
| 158 | MDYKDHDGDYKDHDIDYKDDDDKMAPKKKRKVGIHGVPAADKKYSIGLDIGTNSVGWAVITDEYKVPSKKFKVLGNTDRHSIKKNLIGALLFDSGETAEATRLKRTARRRYTRRKNRIC | AII16583.1 |
| | YLQEIFSNEMAKVDDSFFHRLEESFLVEEDKKHERHPIFGNIVDEVAYHEKYPTIYHLRKKLVDSTDKADLRLIYLALAHMIKFRGHFLIEGDLNPDNSDVDKLFIQLVQTYNQLFEEN | [Synthetic] |
| | PINASGVDAKAILSARLSKSRRLENLIAQLPGEKKNGLFGNLIALSLGLTPNFKSNFDLAEDAKLQLSKDTYDDDLDNLLAQIGDQYADLFLAAKNLSDAILLSDILRVNTEITKAPLS | |
| | ASMIKRYDEHHQDLTLLKALVRQQLPEKYKEIFFDQSKNGYAGYIDGGASQEEFYKFIKPILEKMDGTEELLVKLNREDLLRKQRTFDNGSIPHQIHLGELHAILRRQEDFYPFLKDNR | |
| | EKIEKILTFRIPYYVGPLARGNSRFAWMTRKSEETITPWNFEEVVDKGASAQSFIERMTNFDKNLPNEKVLPKHSLLYEYFTVYNELTKVKYVTEGMRKPAFLSGEQKKAIVDLLFKTN | |
| | RKVTVKQLKEDYFKKIECFDSVEISGVEDRFNASLGTYHDLLKIIKDKDFLDNEENEDILEDIVLTLTLFEDREMIEERLKTYAHLFDDKVMKQLKRRRYTGWGRLSRKLINGIRDKQS | |
| | GKTILDFLKSDGFANRNFMQLIHDDSLTFKEDIQKAQVSGQGDSLHEHIANLAGSPAIKKGILQTVKVVDELVKVMGRHKPENIVIEMARENQTTQKGQKNSRERMKRIEEGIKELGSQ | |
| | ILKEHPVENTQLQNEKLYLYYLQNGRDMYVDQELDINRLSDYDVDHIVPQSFLKDDSIDNKVLTRSDKNRGKSDNVPSEEVVKKMKNYWRQLLNAKLITQRKFDNLTKAERGGLSELDK | |
| | AGFIKRQLVETRQITKHVAQILDSRMNTKYDENDKLIREVKVITLKSKLVSDFRKDFQFYKVREINNYHHAHDAYLNAVVGTALIKKYPKLESEFVYGDYKVYDVRKMIAKSEQEIGKA | |
| | TAKYFFYSNIMNFFKTEITLANGEIRKRPLIETNGETGEIVWDKGRDFATVRKVLSMPQVNIVKKTEVQTGGFSKESILPKRNSDKLIARKKDWDPKKYGGFDSPTVAYSVLVVAKVEK | |
| | GKSKKLKSVKELLGITIMERSSFEKNPIDFLEAKGYKEVKKDLIIKLPKYSLFELENGRKRMLASAGELQKGNELALPSKYVNFLYLASHYEKLKGSPEDNEQKQLFVEQHKHYLDEII | |
| | EQISEFSKRVILADANLDKVLSAYNKHRDKPIREQAENIIHLFTLTNLGAPAAFKYFDTTIDRKRYTSTKEVLDATLIHQSITGLYETRIDLSQLGGDKRPAATKKAGQAKKKKK | |
| 159 | MDKKYSIGLDIGTNSVGWAVITDEYKVPSKKFKVLGNTDRHSIKKNLIGALLFDSGETAEATRLKRTARRRYTRRKNRICYLQEIFSNEMAKVDDSFFHRLEESFLVEEDKKHERHPIF | AKQ21048.1 |
| | GNIVDEVAYHEKYPTIYHLRKKLVDSTDKADLRLIYLALAHMIKFRGHFLIEGDLNPDNSDVDKLFIQLVQTYNQLFEENPINASGVDAKAILSARLSKSRRLENLIAQLPGEKKNGLF | [Synthetic] |
| | GNLIALSLGLTPNFKSNFDLAEDAKLQLSKDTYDDDLDNLLAQIGDQYADLFLAAKNLSDAILLSDILRVNTEITKAPLSASMIKRYDEHHQDLTLLKALVRQQLPEKYKEIFFDQSKN | |
| | GYAGYIDGGASQEEFYKFIKPILEKMDGTEELLVKLNREDLLRKQRTFDNGSIPHQIHLGELHAILRRQEDFYPFLKDNREKIEKILTFRIPYYVGPLARGNSRFAWMTRKSEETITPW | |
| | NFEEVVDKGASAQSFIERMTNFDKNLPNEKVLPKHSLLYEYFTVYNELTKVKYVTEGMRKPAFLSGEQKKAIVDLLFKTNRKVTVKQLKEDYFKKIECFDSVEISGVEDRFNASLGTYH | |
| | DLLKIIKDKDFLDNEENEDILEDIVLTLTLFEDREMIEERLKTYAHLFDDKVMKQLKRRRYTGWGRLSRKLINGIRDKQSGKTILDFLKSDGFANRNFMQLIHDDSLTFKEDIQKAQVS | |
| | GQGDSLHEHIANLAGSPAIKKGILQTVKVVDELVKVMGRHKPENIVIEMARENQTTQKGQKNSRERMKRIEEGIKELGSQILKEHPVENTQLQNEKLYLYYLQNGRDMYVDQELDINRL | |
| | SDYDVDHIVPQSFLKDDSIDNKVLTRSDKNRGKSDNVPSEEVVKKMKNYWRQLLNAKLITQRKFDNLTKAERGGLSELDKAGFIKRQLVETRQITKHVAQILDSRMNTKYDENDKLIRE | |
| | VKVITLKSKLVSDFRKDFQFYKVREINNYHHAHDAYLNAVVGTALIKKYPKLESEFVYGDYKVYDVRKMIAKSEQEIGKATAKYFFYSNIMNFFKTEITLANGEIRKRPLIETNGETGE | |
| | IVWDKGRDFATVRKVLSMPQVNIVKKTEVQTGGFSKESILPKRNSDKLIARKKDWDPKKYGGFDSPTVAYSVLVVAKVEKGKSKKLKSVKELLGITIMERSSFEKNPIDFLEAKGYKEV | |
| | KKDLIIKLPKYSLFELENGRKRMLASAGELQKGNELALPSKYVNFLYLASHYEKLKGSPEDNEQKQLFVEQHKHYLDEIIEQISEFSKRVILADANLDKVLSAYNKHRDKPIREQAENI | |
| | IHLFTLTNLGAPAAFKYFDTTIDRKRYTSTKEVLDATLIHQSITGLYETRIDLSQLGGDGSPKKKRKVSSGGAAG | |
| 160 | MLKKDYSIGLDIGTNSVGHAVVTDDYKVPTKKMKVFGDTSKKTIKKNMLGVLLFNEGQTAADTRLKRGARRRYTRRKNRLRYLQEIFAPALAKVDPNFFYRLEESSLVAEDKKYDVYPI | KDA45870.1 |
| | FGKREEELLYHDTHKTIYHLRSELANNDRPADLRLVYLALAHIIKYRGNFLLEGEIDLRTTDINKVFAEFSETLNENSDENLGKLDVADIFKDNTFSKTKKSEELLKLSGAKKNQLAHQ | [Lactobacillus |
| | LFKMMVGNMGSFKKVLGTDEEHKLSFGKDTYEDDLNDLLAEAGDQYLDIFVAAKKVYDAAILASILDVKDTQTKTVFSQAMIERYEEHQKDLIELKRVFKKYLPEKCHDFFSEPKISGY | animalis] |
| | AGYIDGKVSEEDFYKYTKKTLKGIPETEEILQKIDANNYLRKQRTFDNGAIPHQVHLKELVAIVENQGKYYPFLRENKDKFEKILNFRIPYYVGPLARGNSKFAWLTRAGEGKITPYNF | |
| | DEMIDKETSAEDFIKRMTINDLYLPTEPVLPKHSLLYERYTIFNELAGVRYVTENGEAKYFDAQTKRSIFELFKLDRKVSEKMVIKHLKVVMPAIRIQALKGLDNGKFNASYGTYKDLV | |
| | DMGVAPELLNDEVNSEKWEDIIKTLTIFEGRKLIKRRLENYRDFLGEDILRKLSRKKYTGWGRLSAKLLDGIYDKKTHKTILDCLMTEDYSQNFMQLINDDTYSFKETIKNAQVIEKEE | |
| | TLAKTVQELPGSPAIKKGILQSLEIVDEIIKVMGYKPKSIVVEMARETQKTHGTRKREDRVQQIVKNLKDANELPKKLPSNAELSDERKYLYCLQNGRDMYTGAPLDYDHLQFYDVDHI | |
| | IPQSFLKDDSIENKVLTIKKENVRKTNGLPSEAVIQKMGSFWKKLLDAGAMTNKKYDNLRRNLHGGLNEKLKERFIERQLVETRQITKYVAQLLDQRLNYDGNGVELDEKIAIVTLKAQ | |
| | LASQFRSEFKLRKVRALNNLHHAHDAYLNAVVANLIMAKYPELEPEFVYGKYRKTKFKGLGKATAKNTLYANVLYFLKENEVYPFWDKARDLPTIKRYLYRAQVNKVRKAERQTGGFSD | |
| | EMLVPKSDSGKLLPRKEGLDPVKYGGYAKAVESYAVLITADEVKKGKTKKVKTLVNIPIIDSKKYEADPTAYLASRGYTNVTNSFILPKYSLLEDPEGRRRYLASFKEFQKANELILPQ | |
| | HLVELLYWVNAKDGEQKLEDHKAEFKELFDKIMEFADKYVVAPKNSEKIRRLYEENQDATPMELGKNFVELLRYTADGAASDFKFFGENIPRKRYNSAGSLLNGTLIYQSKTGLYETRI | |
| | DLGKL | |
| 161 | MAPKKKRKVGIHGVPAADKKYSIGLDIGTNSVGWAVITDEYKVPSKKFKVLGNTDRHSIKKNLIGALLFDSGETAEATRLKRTARRRYTRRKNRICYLQEIFSNEMAKVDDSFFHRLEE | AKE81011.1 |
| | SFLVEEDKKHERHPIFGNIVDEVAYHEKYPTIYHLRKKLVDSTDKADLRLIYLALAHMIKFRGHFLIEGDLNPDNSDVDKLFIQLVQTYNQLFEENPINASGVDAKAILSARLSKSRRL | [Synthetic] |
| | ENLIAQLPGEKKNGLFGNLIALSLGLTPNFKSNFDLAEDAKLQLSKDTYDDDLDNLLAQIGDQYADLFLAAKNLSDAILLSDILRVNTEITKAPLSASMIKRYDEHHQDLTLLKALVRQ | |
| | QLPEKYKEIFFDQSKNGYAGYIDGGASQEEFYKFIKPILEKMDGTEELLVKLNREDLLRKQRTFDNGSIPHQIHLGELHAILRRQEDFYPFLKDNREKIEKILTFRIPYYVGPLARGNS | |
| | RFAWMTRKSEETITPWNFEEVVDKGASAQSFIERMTNFDKNLPNEKVLPKHSLLYEYFTVYNELTKVKYVTEGMRKPAFLSGEQKKAIVDLLFKTNRKVTVKQLKEDYFKKIECFDSVE | |
| | ISGVEDRFNASLGTYHDLLKIIKDKDFLDNEENEDILEDIVLTLTLFEDREMIEERLKTYAHLFDDKVMKQLKRRRYTGWGRLSRKLINGIRDKQSGKTILDFLKSDGFANRNFMQLIH | |
| | DDSLTFKEDIQKAQVSGQGDSLHEHIANLAGSPAIKKGILQTVKVVDELVKVMGRHKPENIVIEMARENQTTQKGQKNSRERMKRIEEGIKELGSQILKEHPVENTQLQNEKLYLYYLQ | |
| | NGRDMYVDQELDINRLSDYDVDHIVPQSFLKDDSIDNKVLTRSDKNRGKSDNVPSEEVVKKMKNYWRQLLNAKLITQRKFDNLTKAERGGLSELDKAGFIKRQLVETRQITKHVAQILD | |
| | SRMNTKYDENDKLIREVKVITLKSKLVSDFRKDFQFYKVREINNYHHAHDAYLNAVVGTALIKKYPKLESEFVYGDYKVYDVRKMIAKSEQEIGKATAKYFFYSNIMNFFKTEITLANG | |
| | EIRKRPLIETNGETGEIVWDKGRDFATVRKVLSMPQVNIVKKTEVQTGGFSKESILPKRNSDKLIARKKDWDPKKYGGFDSPTVAYSVLVVAKVEKGKSKKLKSVKELLGITIMERSSF | |
| | EKNPIDFLEAKGYKEVKKDLIIKLPKYSLFELENGRKRMLASAGELQKGNELALPSKYVNFLYLASHYEKLKGSPEDNEQKQLFVEQHKHYLDEIIEQISEFSKRVILADANLDKVLSA | |
| | YNKHRDKPIREQAENIIHLFTLTNLGAPAAFKYFDTTIDRKRYTSTKEVLDATLIHQSITGLYETRIDLSQLGGDKRPAATKKAGQAKKKK | |
| 162 | IVDYCIGLDLGTGSVGWAVVDMNHRLMKRNGKHLWGSRLFSNAETAANRRASRSIRRRYNKRRERIRLLRAILQDMVLEKDPTFFIRLEHTSFLDEEDKAKYLGTDYKDNYNLFIDEDF | WP_006506696.1 |
| | NDYTYYHKYPTIYHLRKALCESTEKADPRLIYLALHHIVKYRGNFLYEGQKFNMDASNIEDKLSDIFTQFTSFNNIPYEDDEKKNLEILEILKKPLSKKAKVDEVMTLIAPEKDYKSAF | [Catenibacterium |
| | KELVTGIAGNKMNVTKMILCEPIKQGDSEIKLKFSDSNYDDQFSEVEKDLGEYVEFVDALHNVYSWVELQTIMGATHTDNASISEAMVSRYNKHHDDLKLLKDCIKNNVPNKYFDMFRN | mitsuokai] |
| | DSEKSKGYYNYINRPSKAPVDEFYKYVKKCIEKVDTPEAKQILNDIELENFLLKQNSRTNGSVPYQMQLDEMIKIIDNQAEYYPILKEKREQLLSILTFRIPYYFGPLNETSEHAWIKR | |
| | LEGKENQRILPWNYQDIVDVDATAEGFIKRMRSYCTYFPDEEVLPKNSLIVSKYEVYNELNKIRVDDKLLEVDVKNDIYNELFMKNKTVTEKKLKNWLVNNQCCSKDAEIKGFQKENQF | |
| | STSLTPWIDFTNIFGKIDQSNFDLIENIIYDLTVFEDKKIMKRRLKKKYALPDDKVKQILKLKYKDWSRLSKKLLDGIVADNRFGSSVTVLDVLEMSRLNLMEIINDKDLGYAQMIEEA | |
| | TSCPEDGKFTYEEVERLAGSPALKRGIWQSLQIVEEITKVMKCRPKYIYIEFERSEEAKERTESKIKKLENVYKDLDEQTKKEYKSVLEELKGFDNTKKISSDSLFLYFTQLGKCMYSG | |
| | KKLDIDSLDKYQIDHIVPQSLVKDDSFDNRVLVVPSENQRKLDDLVVPFDIRDKMYRFWKLLFDHELISPKKFYSLIKTEYTERDEERFINRQLVETRQITKNVTQIIEDHYSTTKVAA | |
| | IRANLSHEFRVKNHIYKNRDINDYHHAHDAYIVALIGGFMRDRYPNMHDSKAVYSEYMKMFRKNKNDQKRWKDGFVINSMNYPYEVDGKLIWNPDLINEIKKCFYYKDCYCTTKLDQKS | |
| | GQLFNLTVLSNDAHADKGVTKAVVPVNKNRSDVHKYGGFSGLQYTIVAIEGQKKKGKKTELVKKISGVPLHLKAASINEKINYIEEKEGLSDVRIIKDNIPVNQMIEMDGGEYLLTSPT | |
| | EYVNARQLVLNEKQCALIADIYNAIYKQDYDNLDDILMIQLYIELTNKMKVLYPAYRGIAEKFESMNENYVVISKEEKANIIKQMLIVMHRGPQNGNIVYDDFKISDRIGRLKTKNHNL | |
| | NNIVFISQSPTGIYTKKYKL | |
| 163 | LSASMIKRYDEHHQDLTLLKALVRQQLPEKYKEIFFDQSKNGYAGYIDGGASQEEFYKFIKPILEKMDGTEELLAKLNREDLLRKQRTFDNGSIPHQIHLGELHAILRRQEDFYPFLKD | WP_009880683.1 |
| | NREKIEKILTFRIPYYVGPLARGNSRFAWMTRKSEETITPWNFEEVVDKGASAQSFIERMTNFDKNLPNEKVLPKHSLLYEYFTVYNELTKVKYVTEGMRKPAFLSGEQKKAIVDLLFK | [Streptococcus |
| | TNRKVTVKQLKEDYFKKIECFDSVEISGVEDRFNASLGTYHDLLKIIKDKDFLDNEENEDILEDIVLTLTLFEDREMIEERLKTYAHLFDDKV+KQLKRRRYTGWGRLSRKLINGIRDK | pyogenes] |
| | QSGKTILDFLKSDGFANRNFMQLIHDDSLTFKEDLQKAQVSGQGDSLHEHIANLAGSPAIKKGILQTVKVVDELVKVMGRHKPENIVIEMARENQTTQKGQKNSRERMKRIEEGIKELG | |
| | SDILKEYPVENTQLQNEKLYLYYLQNGRDMYVDQELDINRLSDYDVDHIVPQSFLKDDSIDNKVLTRSDKNRGKSDNVPSEEVVKKMKNYWKQLLNAKLITQRKFDNLTKAERGGLSEL | |
| | DKAGFIKRQLVETRQITKHVAQILDSRMNTKYDENDKLIREVRVITLKSKLVSDFRKDFQFYKVREINNYHHAHDAYLNAVVGTALIKKYPKLESEFVYGDYKVYDIRKMIAKSEQEIG | |
| | KATAKYFFYSNIMNFFKTEITLANGEIRKRPLIETNGETGEIVWDKGRDFATVRKVLSMPQVNIVKKTEVQTGGFSKESILPKRNSDKLIARKKDWDPKKYGGFDSPTVAYSVLVVAKV | |
| | EKGKSKKLKSVKELVGITIMERSSFEKDPVDFLEAKGYKEVRKDLIIKLPKYSLFELENGRKRMLASAGELQKGNELALPSKYVNFLYLASHYEKLKGSPEDNEQKQLFVEQHKHYLDE | |
| | IIEQISEFSKRVILADANLDKVLSAYNKHRDKPIREQAENIIHLFTLTNLGAPAAFKCFDTTIGRNRYKSIKEVLDATLIHQSITGLYETRIDLSQLGGD | |
| 164 | MAKNKDIRYSIGLDIGTNSVGWAVMDEHYELLKKGNHHMWGSRLFDAAEPAATRRASRSIRRRYNKRRERIRLLRDLLGDMVMEVDPTFFIRLLNVSFLDEEDKQKNLGNDYKDNYNLF | WP_033162887.1 |
| | IEKDFNDKTYYDKYPTIYHLRKELCENKEKADPRLIYLALHHIVKYRGNFLYEGQSFTMDNSDIEERLNSAIEKFMSINEFDNRIVESDINSMIAVLSKIYQRSKKADDLLKIMNPTKE | [Sharpea |
| | EKAAYKEFTKALVGLKFNISKMILAQEVKKGDTDIVLEFSNANYDSTIDELQSELGEYIEFIEMLHNIYSWVELQAILGATHTDNPSISAAMVERYEEHKKDLRVLKKVIREELPDKYN | azabuensis] |
| | EVFRKDNRKLHNYLGYIKYPKDTPVEEFYKYIKGLLAKVDTDEAREILERIDLEKFMLKQNSRTNGSIPYQMQKDEMIQIIDNQSVYYPQLKENRDKLISILEFRIPYYFGPLNAHSEF | |
| | AWIKKFEDKQKERILPWNYDQIVDIDATAEGFIERMKNTGTYFPDEPVMAKNSLTVSKFEVLNELNKIRINGKLIAVETKKELLSDLFMKNKTITDKKLKDWLVTHQYYDINEELKIEG | |
| | YQKDLQFSTSLAPWIDFTKIFGEINASNYQLIEKIIYDISIFEDKKILKRRLKKVYQLDDLLVDKILKLNYTGWSRLSEKLLTGMTADNEFGSKATVLFVLENSNKNLMEIINDEKLGY | |
| | KQIIEESNMQDIEGPFKYDEVKKLAGSPAIKRGIWQALLVVREITKFMKHEPSHIYIEFAREEQEKVRKESKIAKLQKIYENLNLQTKEDQQVYESLKKEDAKKRMETDALYLYYLQMG | |
| | KSMYSGKPLDIDKLSTYQIDHILPQSLIKDDSFDNRVLVLPEENQWKLDSETVPFEIRNKMIGFWQMLHENGLMSNKKFFSLIRTDFSDKDKERFINRQLVETRQIIKNVAVIINDHYT | |
| | NTNIVTVRAELSHQFRERYKIYKNRDINDFHHAHDAYIACIVGQFMHQNFEHLDAKIIYGQYKKNYKKDVKHHNNYGFILNSMNHLQSDIDTGEVMWDPAKIGKIKSCFYYKDVYVTKK | |
| | LEQNSGTLFNVTVLPNDAHSEKGITAATVPLNKYRADVHKYGGFGNVQSIIVAIEGKKKKGKKLIDVRKLTSIPLHLKNAPVEEQLSYIASPEHEDLIDVRIVKEILKNQLIEIDGGLY | |
| | YVTSPTEYVTARQLSLNEQSCKLISEIYAAMLKKRYEYLDEEEIFDLYLQLLQKMDTLYPAYKGIAKRFFDRAEDFKNIDVVEKCDVIKQILIIMHAGPMNGNIMYDDFKFTNRIGRFT | |
| | HKNIDLNKTTFISTSVTGLFSKKYKL | |
| 165 | MDKKYSIGLDIGTNSVGWAVITDDYKVPSKKFKVLGNTDRHGIKKNLIGALLFDSGETAEATRLKRTARRRYTRRKNRICYLQEIFSNEMAKVDDSFFHRLEESFLVEEDKKHERHPIF | WP_030126706.1 |
| | GNIVDEVAYHEKYPTIYHLRKKLADSTDKVDLRLIYLALAHMIKFRGHFLIEGDLNPDNSDVDKLFIQLVQTYNQLFEENPINASRVDAKAILSARLSKSRRLENLIAQLPGEKKNGLF | [Streptococcus |
| | GNLIALSLGLTPNFKSNFDLAEDAKLQLSKDTYDDDLDNLLAQIGDQYADLFLAAKNLSDATLLSDILRVNSEITKAPLSASMIKRYDEHHQDLTLLKALVRQQLPEKYKEIFFDQSKN | pyogenes] |
| | GYAGYIDGGASQEEFYKFIKPILEKMDGTEELLAKLNREDLLRKQRTFDNGSIPYQIHLGELHAILRRQEDFYPFLKDNREKIEKILTFRIPYYVGPLARGNSRFAWMTRKSEETITPW | |
| | NFEEVVDKGASAQSFIERMTNFDKNLPNEKVLPKHSLLYEYFTVYNELTKVKYVTEGMRKPAFLSGEQKKAIVDLLFKTNRKVTVKQLKEDYFKKIECFDSVEISGVEDRFNASLGTYH | |
| | DLLKIIKDKDFLDNEENEDILEDIVLTLTLFEDREMIEERLKTYAHLFDDKVMKQLKRRRYTGWGRLSRKLINGIRDKQSGKTILDFLKSDGFANRNFMQLIHDDSLTFKEDIQKAQVS | |
| | GQGDSLHEHIANLAGSPAIKKGILQTVKVVDELVKVMGRHKPENIVIEMARENQTTQKGQKNSRERMKRIEEGIKELGSDILKEYPVENTQLQNEKLYLYYLQNGRDMYVDQELDINRL | |
| | SDYDVDHIVPQSFLKDDSIDNKVLTRSDKNRGKSDNVPSEEVVKKMKNYWRQLLNAKLITQRKFDNLTKAERGGLSELDKAGFIKRQLVETRQITKHVAQILDSRMNTKYDENDKLIRE | |
| | VKVITLKSKLVSDFRKDFQFYKVREINNYHHAHDAYLNAVVGTALIKKYPKLESEFVYGDYKVYDVRKMIAKSEQEIGKATAKYFFYSNIMNFFKTEITLANGEIRKRPLIETNGETGE | |
| | IVWDKGRDFATVRKVLSMPQVNIVKKTEVQTGGFSKESILPKRNSDKLIARKKDWDPKKYGGFDSPTVAYSVLVVAKVEKGKSKKLKSVKELLGITIMERSSFEKNPIDFLEAKGYKEV | |
| | RKDLIIKLPKYSLFELENGRKRMLASAGELQKGNELALPSKYVNFLYLASHYEKLKGSPEDNEQKQLFVEQHKHYLDEIIEQISEFSKRVILADANLDKVLSAYNKHRDKPIREQAENI | |
| | IHLFTLTNLGAPAAFKYFDTTIDRKRYTSTKEVLDATLIHQSITGLYETRIDLSQLGGD | |
| 166 | MDKKYSIGLDIGTNSVGWAVITDDYKVPSKKFKVLGNTDRHSIKKNLIGALLFDSGEIAEATRLKRTARRRYTRRKNRICYLQEIFSNEMAKVDDSFFHRLEESFLVEEDKKHERHPIF | WP_011527619.1 |
| | GNIVDEVAYHEKYPTIYHLRKKLVDSTDKADLRLIYLALAHMIKFRGHFLIEGDLNPDNSDVDKLFIQLVQTYNQLFEENPINASGVDAKAILSARLSKSRRLENLIAQLPGEKKNGLF | [Streptococcus |
| | GNLIALSLGLTPNFKSNFDLAEDAKLQLSKDTYDDDLDNLLAQIGDQYADLFLAAKNLSDAILLSDILRLNSEITKAPLSASMIKRYDEHHQDLTLLKALVRQQLPEKYKEIFFDQSKN | pyogenes] |
| | GYAGYIDGGASQEEFYKFIKPILEKMDGTEELLAKLNREDLLRKQRTFDNGSIPHQIHLGELHAILRRQEDFYPFLKDNREKIEKILTFRIPYYVGPLARGNSRFAWMTRKSEETITPW | |
| | NFEEVVDKGASAQSFIERMTNFDKNLPNEKVLPKHSLLYEYFTVYNELTKVKYVTEGMRKPAFLSGEQKKAIVDLLFKTNRKVTVKQLKEDYFKKIECFDSVEISGVEDRFNASLGTYH | |
| | DLLKIIKDKDFLDNEENEDILEDIVLTLTLFEDREMIEERLKTYAHLFDDKVMKQLKRRRYTVWGRLSRKLINGIRDKQSGKTILDFLKSDGFANRNFMQLIHDDSLTFKEDIQKAQVS | |
| | GQGDSLHEHIANLAGSPAIKKGILQTVKVVDELVKVMGRHKPENIVIEMARENQTTQKGQKNSRERMKRIEEGIKELGSQILKEHPVENTQLQNEKLYLYYLQNGRDMYVDQELDINRL | |
| | SDYDVDHIVPQSFIKDDSIDNKVLTRSDKNRGKSDNVPSEEVVKKMKNYWRQLLNAKLITQRKFDNLTKAERGGLSELDKAGFIKRQLVETRQITKHVAQILDSRMNTKYDENDKLIRE | |
| | VKVITLKSKLVSDFRKDFQFYKVREINNYHHAHDAYLNAVVGTALIKKYPKLESEFVYGDYKVYDVRKMLAKSEQEIGKATAKYFFYSNIMNFFKTEITLANGEIRKRPLIETNGETGE | |
| | IVWDKGRDFATVRKVLSMPQVNIVKKTEVQTGGFSKESILPKRNSDKLIARKKDWDPKKYGGFDSPTVAYSVLVVAKVEKGKSKKLKSVKELLGITIMERSSFEKNPIDFLEAKGYKEV | |
| | RKDLIIKLPKYSLFELENGRKRMLASAGELQKGNELALPSKYVNFLYLASHYEKLKGSPEDNEQKQLFVEQHKHYLDEIIEQISEFSKRVILADANLDKVLSAYNKHRDKPIREQAENI | |
| | IHLFTLTNLGAPTAFKYFDTTIDRKRYTSTKEVLDATFIHQSITGLYETRIDLSQLGGD | |
| 167 | MDKKYSIGLDIGTNSVGWAVITDDYKVPSKKFKVLGNTDRHSIKKNLIGALLFDSGEIAEATRLKRTARRRYTRRKNRICYLQEIFSNEMAKVDDSFFHRLEESFLVEEDKKHERHPIF | WP_002989955.1 |
| | GNIVDEVAYHEKYPTIYHLRKKLVDSTDKADLRLIYLALAHMIKFRGHFLIEGDLNPDNSDVDKLFIQLVQTYNQLFEENPINASGVDAKAILSARLSKSRRLENLIAQLPGEKKNGLF | [Streptococcus - |
| | GNLIALSLGLTPNFKSNFDLAEDAKLQLSKDTYDDDLDNLLAQIGDQYADLFLAAKNLSDAILLSDILRLNSEITKAPLSASMIKRYDEHHQDLTLLKALVRQQLPEKYKEIFFDQSKN | multispecies] |
| | GYAGYIDGGASQEEFYKFIKPILEKMDGTEELLAKLNREDLLRKQRTFDNGSIPHQIHLGELHAILRRQEDFYPFLKDNREKIEKILTFRIPYYVGPLARGNSRFAWMTRKSEETITPW | |
| | NFEEVVDKGASAQSFIERMTNFDKNLPNEKVLPKHSLLYEYFTVYNELTKVKYVTEGMRKPAFLSGEQKKAIVDLLFKTNRKVTVKQLKEDYFKKIECFDSVEISGVEDRFNASLGTYH | |
| | DLLKIIKDKDFLDNEENEDILEDIVLTLTLFEDREMIEERLKTYAHLFDDKVMKQLKRRRYTGWGRLSRKLINGIRDKQSGKTILDFLKSDGFANRNFMQLIHDDSLTFKEDIQKAQVS | |
| | GQGDSLHEHIANLAGSPAIKKGILQTVKVVDELVKVMGRHKPENIVIEMARENQTTQKGQKNSRERMKRIEEGIKELGSQILKEHPVENTQLQNEKLYLYYLQNGRDMYVDQELDINRL | |
| | SDYDVDHIVPQSFIKDDSIDNKVLTRSDKNRGKSDNVPSEEVVKKMKNYWRQLLNAKLITQRKFDNLTKAERGGLSELDKAGFIKRQLVETRQITKHVAQILDSRMNTKYDENDKLIRE | |
| | VKVITLKSKLVSDFRKDFQFYKVREINNYHHAHDAYLNAVVGTALIKKYPKLESEFVYGDYKVYDVRKMLAKSEQEIGKATAKYFFYSNIMNFFKTEITLANGEIRKRPLIETNGETGE | |
| | IVWDKGRDFATVRKVLSMPQVNIVKKTEVQTGGFSKESILPKRNSDKLIARKKDWDPKKYGGFDSPTVAYSVLVVAKVEKGKSKKLKSVKELLGITIMERSSFEKNPIDFLEAKGYKEV | |
| | RKDLIIKLPKYSLFELENGRKRMLASAGELQKGNELALPSKYVNFLYLASHYEKLKGSPEDNEQKQLFVEQHKHYLDEIIEQISEFSKRVILADANLDKVLSAYNKHRDKPIREQAENI | |
| | IHLFTLTNLGAPTAFKYFDTTIDRKRYTSTKEVLDATFIHQSITGLYETRIDLSQLGGD | |
| 168 | MDKKYSIGLDIGTNSVGWAVITDDYKVPSKKFKVLGNTDRHSIKKNLIGALLFDSGEIAEATRLKRTARRRYTRRKNRICYLQEIFSNEMAKVDDSFFHRLEESFLVEEDKKHERHPIF | WP_032464890.1 |
| | GNIVDEVAYHEKYPTIYHLRKKLVDSTDKADLRLIYLALAHMIKFRGHFLIEGDLNPDNSDVDKLFIQLVQTYNQLFEENPINASGVDAKAILSARLSKSRRLENLIAQLPGEKKNGLF | [Streptococcus |
| | GNLIALSLGLTPNFKSNFDLAEDAKLQLSKDTYDDDLDNLLAQIGDQYADLFLAAKNLSDAILLSDILRLNSEITKAPLSASMIKRYDEHHQDLTLLKALVRQQLPEKYKEIFFDQSKN | pyogenes] |
| | GYAGYIDGGASQEEFYKFIKPILEKMDGTEELLAKLNRKDLLRKQRTFDNGSIPHQIHLGELHAILRRQEDFYPFLKDNREKIEKILTFRIPYYVGPLARGNSRFAWMTRKSEETITPW | |
| | NFEEVVDKGASAQSFIERMTNFDKNLPNEKVLPKHSLLYEYFTVYNELTKVKYVTEGMRKPAFLSGEQKKAIVDLLFKTNRKVTVKQLKEDYFKKIECFDSVEISGVEDRFNASLGTYH | |
| | DLLKIIKDKDFLDNEENEDILEDIVLTLTLFEDREMIEERLKTYAHLFDDKVMKQLKRRRYTGWGRLSRKLINGIRDKQSGKTILDFLKSDGFANRNFMQLIHDDSLTFKEDIQKAQVS | |
| | GQGDSLHEHIANLAGSPAIKKGILQTVKVVDELVKVMGRHKPENIVIEMARENQTTQKGQKNSRERMKRIEEGIKELGSQILKEHPVENTQLQNEKLYLYYLQNGRDMYVDQELDINRL | |
| | SDYDVDHIVPQSFIKDDSIDNKVLTRSDKNRGKSDNVPSEEVVKKMKNYWRQLLNAKLITQRKFDNLTKAERGGLSELDKAGFIKRQLVETRQITKHVAQILDSRMNTKYDENDKLIRE | |
| | VKVITLKSKLVSDFRKDFQFYKVREINNYHHAHDAYLNAVVGTALIKKYPKLESEFVYGDYKVYDVRKMLAKSEQEIGKATAKYFFYSNIMNFFKTEITLANGEIRKRPLIETNGETGE | |
| | IVWDKGRDFATVRKVLSMPQVNIVKKTEVQTGGFSKESILPKRNSDKLIARKKDWDPKKYGGFDSPTVAYSVLVVAKVEKGKSKKLKSVKELLGITIMERSSFEKNPIDFLEAKGYKEV | |
| | RKDLIIKLPKYSLFELENGRKRMLASAGELQKGNELALPSKYVNFLYLASHYEKLKGSPEDNEQKQLFVEQHKHYLDEIIEQISEFSKRVILADANLDKVLSAYNKHRDKPIREQAENI | |
| | IHLFTLTNLGAPTAFKYFDTTIDRKRYTSTKEVLDATFIHQSITGLYETRIDLSQLGGD | |
| 169 | MDKKYSIGLDIGTNSVGWAVITDDYKVPSKKFKVLGNTDRHSIKKNLIGALLFDSGETAEATRLKRTARRRYTRRKNRICYLQEIFSNEIAKVDDSFFHRLEESFLVEEDKKHERHPIF | WP_012560673.1 |
| | GNIVDEVAYHEKYPTIYHLRKKLADSTDKADLRLIYLALAHMIKFRGHFLIEGDLNPDNSDVDKLFIQLVQTYNQLFEENPINASRVDAKAILSARLSKSRRLENLIAQLPGEKRNGLF | [Streptococcus |
| | GNLIALSLGLTPNFKSNFDLAEDAKLQLSKDTYDDDLDNLLAQIGDQYADLFLAAKNLSDAILLSDILRVNTEITKAPLSASMIKRYDEHHQDLTLLKALVRQQLPEKYKEIFFDQSKN | pyogenes] |
| | GYAGYIDGGASQEEFYKFIKPILEKMDGTEELLAKLNREDLLRKQRTFDNGSIPHQIHLGELHAILRRQEDFYPFLKDNREKIEKILTFRIPYYVGPLARGNSRFAWMTRKSEETITPW | |
| | NFEEVVDKGASAQSFIERMTNFDKNLPNEKVLPKHSLLYEYFTVYNELTKVKYVTEGMRKPAFLSGEQKKAIVDLLFKTNRKVTVKQLKEDYFKKIECFDSVEISGVEDRFNASLGTYH | |
| | DLLKIIKDKDFLDNEENEDILEDIVLTLTLFEDREMIEERLKTYAHLFDDKVMKQLKRRRYTGWGRLSRKLINGIRDKQSGKTILDFLKSDGFANRNFMQLIHDDSLTFKEDLQKAQVS | |
| | GQGDSLHEHIANLAGSPAIKKGILQTVKVVDELVKVMGRHKPENIVIEMARENQTTQKGQKNSRERMKRIEEGIKELGSDILKEYPVETTQLQNEKLYLYYLQNGRDMYVDQELDINRL | |
| | SDYDVDHIVPQSFLKDDSIDNKVLTRSDKNRGKSDNVPSEEVVKKMKNYWKQLLNAKLITQRKFDNLTKAERGGLSELDKAGFIKRQLVETRQITKHVAQILDSRMNTKYDENDKLIRE | |
| | VRVITLKSKLVSDFRKDFQFYKVREINNYHHAHDAYLNAVVGTALIKKYPKLESEFVYGDYKVYDIRKMIAKSEQEIGKATAKYFFYSNIMNFFKTEITLANGEIRKRPLIETNGETGE | |
| | IVWDKGRDFATVRKVLSMPQVNIVKKTEVQTGGFSKESILPKRNSDKLIARKKDWDPKKYGGFDSPTVAYSVLVVAKVEKGKSKKLKSVKELVGITIMERSSFEKDPVDFLEAKGYKEV | |
| | RKDLIIKLPKYSLFELENGRKRMLASAGELQKGNELALPSKYVNFLYLASHYEKLKGSPEDNEQKQLFVEQHKHYLDEIIEQISEFSKRVILADANLDKVLSAYNKHRDKPIREQAENI | |
| | IHLFTLTNLGAPAAFKCFDTTIGRNRYKSIKEVLDATLIHQSITGLYETRIDLSQLGGD | |
| 170 | MDKKYSIGLDIGTNSVGWAVITDDYKVPSKKFKVLGNTDRHSIKKNLIGALLFDSGETAEATRLKRTARRRYTRRKNRICYLQEIFSNEIAKVDDSFFHRLEESFLVEEDKKHERHPIF | WP_032460140.1 |
| | GNIVDEVAYHEKYPTIYHLRKKLADSTDKADLRLIYLALAHMIKFRGHFLIEGDLNPDNSDVDKLFIQLVQTYNQLFEENPINASRVDAKAILSARLSKSRRLENLIAQLPGEKRNGLF | [Streptococcus |
| | GNLIALSLGLTPNFKSNFDLAEDAKLQLSKDTYDDDLDNLLAQIGDQYADLFLAAKNLSDAILLSDILRVNTEITKAPLSASMIKRYDEHHQDLTLLKALVRQQLPEKYKEIFFDQSKN | pyogenes] |
| | GYAGYIDGGASQEEFYKFIKPILEKMDGTEELLAKLNREDLLRKQRTFDNGSIPHQIHLGELHAILRRQEDFYPFLKDNREKIEKILTFRIPYYVGPLARGNSRFAWMTRKSEETITPW | |
| | NFEEVVDKGASAQSFIERMTNFDKNLPNEKVLPKHSLLYEYFTVYNELTKVKYVTEGMRKPAFLSGEQKKAIVDLLFKTNRKVTVKQLKEDYFKKIECFDSVEISGVEDRFNASLGTYH | |
| | DLLKIIKDKDFLDNEENEDILEDIVLTLTLFEDREMIEERLKTYAHLFDDKVMKQLKRRRYTGWGRLSRKLINGIRDKQSGKTILDFLKSDGFANRNFMQLIHDDSLTFKEDLQKAQVS | |
| | GQGDSLHEHIANLAGSPAIKKGILQTVKVVDELVKVMGRHKPENIVIEMARENQTTQKGQKNSRERMKRIEEGIKELGSDILKEYPVENTQLQNEKLYLYYLQNGRDMYVDQELDINRL | |
| | SDYDVDHIVPQSFLKDDSIDNKVLTRSDKNRGKSDNVPSEEVVKKMKNYWKQLLNAKLITQRKFDNLTKAERGGLSELDKAGFIKRQLVETRQITKHVAQILDSRMNTKYDENDKLIRE | |
| | VRVITLKSKLVSDFRKDFQFYKVREINNYHHAHDAYLNAVVGTALIKKYPKLESEFVYGDYKVYDIRKMIAKSEQEIGKATAKYFFYSNIMNFFKTEITLANGEIRKRPLIETNGETGE | |
| | IVWDKGRDFATVRKVLSMPQVNIVKKTEVQTGGFSKESILPKRNSDKLIARKKDWDPKKYGGFDSPTVAYSVLVVAKVEKGKSKKLKSVKELVGITIMERSSFEKDPVDFLEAKGYKEV | |
| | RKDLIIKLPKYSLFELENGRKRMLASAGELQKGNELALPSKYVNFLYLASHYEKLKGSPEDNEQKQLFVEQHKHYLDEIIEQISEFSKRVILADANLDKVLSAYNKHRDKPIREQAENI | |
| | IHLFTLTNLGAPAAFKYFDTTIGRNRYKSIKEVLDATLIHQSITGLYETRIDLSQLGGD | |
| 171 | MDKKYSIGLDIGTNSVGWAVITDDYKVPSKKFKVLGNTDRHSIKKNLIGALLFDSGETAEATRLKRTARRRYTRRKNRICYLQEIFSNEIAKVDDSFFHRLEESFLVEEDKKHERHPIF | WP_032461047.1 |
| | GNIVDEVAYHEKYPTIYHLRKKLADSTDKADLRLIYLALAHMIKFRGHFLIEGGLNPDNSDVDKLFIQLVQTYNQLFEENPINASRVDAKAILSARLSKSRRLENLIAQLPGEKRNGLF | [Streptococcus |
| | GNLIALSLGLTPNFKSNFDLAEDAKLQLSKDTYDDDLDNLLAQIGDQYADLFLAAKNLSDAILLSDILRVNTEITKAPLSASMIKRYDEHHQDLTLLKALVRQQLPEKYKEIFFDQSKN | pyogenes] |
| | GYAGYIDGGASQEEFYKFIKPILEKMDGTEELLAKLNREDLLRKQRTFDNGSIPHQIHLGELHAILRRQEDFYPFLKDNREKIEKILTFRIPYYVGPLARGNSRFAWMTRKSEETITPW | |
| | NFEEVVDKGASAQSFIERMTNFDKNLPNEKVLPKHSLLYEYFTVYNELTKVKYVTEGMRKPAFLSGEQKKAIVDLLFKTNRKVTVKQLKEDYFKKIECFDSVEISGVEDRFNASLGTYH | |
| | DLLKIIKDKDFLDNEENEDILEDIVLTLTLFEDREMIEERLKTYAHLFDDKVMKQLKRRRYTGWGRLSRKLINGIRDKQSGKTILDFLKSDGFANRNFMQLIHDDSLTFKEDLQKAQVS | |
| | GQGDSLHEHIANLAGSPAIKKGILQTVKVVDELVKVMGRHKPENIVIEMARENQTTQKGQKNSRERMKRIEEGIKELGSDILKEYPVENTQLQNEKLYLYYLQNGRDMYVDQELDINRL | |
| | SDYDVDHIVPQSFLKDDSIDNKVLTRSDKNRGKSDNVPSEEVVKKMKNYWKQLLNAKLITQRKFDNLTKAERGGLSELDKAGFIKRQLVETRQITKHVAQILDSRMNTKYDENDKLIRE | |
| | VRVITLKSKLVSDFRKDFQFYKVREINNYHHAHDAYLNAVVGTALIKKYPKLESEFVYGDYKVYDIRKMIAKSEQEIGKATAKYFFYSNIMNFFKTEITLANGEIRKRPLIETNGETGE | |
| | IVWDKGRDFATVRKVLSMPQVNIVKKTEVQTGGFSKESILPKRNSDKLIARKKDWDPKKYGGFDSPTVAYSVLVVAKVEKGKSKKLKSVKELVGITIMERSSFEKDPVDFLEAKGYKEV | |
| | RKDLIIKLPKYSLFELENGRKRMLASAGELQKGNELALPSKYVNFLYLASHYEKLKGSPEDNEQKQLFVEQHKHYLDEIIEQISEFSKRVILADANLDKVLSAYNKHRDKPIREQAENI | |
| | IHLFTLTNLGAPAAFKYFDTTIGRNRYKSIKEVLDATLIHQSITGLYETRIDLSQLGGD | |
| 172 | MDKKYSIGLDIGTNSVGWAVITDDYKVPSKKFKVLGNTDRHSIKKNLIGALLFDSGETAEATRLKRTARRRYTRRKNRICYLQEIFSNEMAKVDDSFFHRLEESFLVEEDKKHERHPIF | WP_038434062.1 |
| | GNIVDEVAYHEKYPTIYHLRKKLADSTDKADLRLIYLALAHMIKFRGHFLIEGDLNPDNSDVDKLFIQLVQTYNQLFEENLINASRVDAKAILSARLSKSRRLENLIAQLPGEKRNGLF | [Streptococcus |
| | GNLIALSLGLTPNFKSNFDLAEDAKLQLSKDTYDDDLDNLLAQIGDQYADLFLAAKNLSDAILLSDILRVNSEITKAPLSASMIKRYDEHHQDLTLLKALVRQQLPEKYKEIFFDQSKN | pyogenes] |
| | GYAGYIDGGASQEEFYKFIKPILEKMDGTEELLAKLNREDLLRKQRTFDNGSIPHQIHLGELHAILRRQEDFYPFLKDNREKIEKILTFRIPYYVGPLARGNSRFAWMTRKSEETITPW | |
| | NFEEVVDKGASAQSFIERMTNFDKNLPNEKVLPKHSLLYEYFTVYNELTKVKYVTEGMRKPAFLSGEQKKAIVDLLFKTNRKVTVKQLKEDYFKKIECFDSVEISGVEDRFNASLGTYH | |
| | DLLKIIKDKDFLDNEENEDILEDIVLTLTLFEDREMIEERLKTYAHLFDDKVMKQLKRRRYTGWGRLSRKLINGIRDKQSGKTILDFLKSDGFANRNFMQLIHDDSLTFKEDIQKAQVS | |
| | GQGDSLHEHIANLAGSPAIKKGILQTVKIVDELVKVMGRHKPENIVIEMARENQTTQKGQKNSRERMKRIEEGIKELGSDILKEYPVENTQLQNEKLYLYYLQNGRDMYVDQELDINRL | |
| | SDYDVDHIVPQSFLKDDSIDNKVLTRSDKNRGKSDNVPSEEVVKKMKNYWKQLLNAKLITQRKFDNLTKAERGGLSELDKAGFIKRQLVETRQITKHVAQILDSRMNTKYDENDKLIRE | |
| | VKVITLKSKLVSDFRKDFQFYKVREINNYHHAHDAYLNAVVGTALIKKYPKLESEFVYGDYKVYDVRKMIAKSEQEIGKATAKYFFYSNIMNFFKTEITLANGEIRKRPLIETNGETGE | |
| | IVWDKGRDFATVRKVLSMPQVNIVKKTEVQTGGFSKESILPKRNSDKLIARKKDWDPKKYGGFDSPTVAYSVLVVAKVEKGKSKKLKSVKELLGITIMERSSFEKNPIDFLEAKGYKEV | |
| | RKDLIIKLPKYSLFELENGRKRMLASAGELQKGNELALPSKYVNFLYLASHYEKLKGSPEDNEQKQLFVEQHKHYLDEIIEQISEFSKRVILADANLDKVLSAYNKHRDKPIREQAENI | |
| | IHLFTLTNLGAPAAFKYFDTTIGRNRYKSIKEVLDATLIHQSITGLYETRIDLSQLGGD | |
| 173 | MDKKYSIGLDIGTNSVGWAVITDDYKVPSKKFKVLGNTDRHSIKKNLIGALLFDSGETAEATRLKRTARRRYTRRKNRICYLQEIFSNEMAKVDDSFFHRLEESFLVEEDKKHERHPIF | WP_032462936.1 |
| | GNIVDEVAYHEKYPTIYHLRKKLADSTDKADLRLIYLALAHMIKFRGHFLIEGDLNPDNSDVDKLFIQLVQTYNQLFEENPINASRVDAKAILSARLSKSRRLENLIAQLPGEKKNGLF | [Streptococcus |
| | GNLIALLLGLTPNFKSNFDLAEDAKLQLSKDTYDDDLDNLLAQIGDQYADLFLAAKNLSDAILLSDILRVNSEITKAPLSASMIKRYDEHHQDLTLLKALVRQQLPEKYKEIFFDQSKN | pyogenes] |
| | GYAGYIDGGASQEEFYKFIKPILEKMDGTEELLAKLNREDLLRKQRTFDNGSIPHQIHLGELHAILRRQEDFYPFLKDNREKIEKILTFRIPYYVGPLARGNSRFAWMTRKSEETITPW | |
| | NFEEVVDKGASAQSFIERMTNFDKNLPNEKVLPKHSLLYEYFTVYNELTKVKYVTEGMRKPAFLSGEQKKAIVDLLFKTNRKVTVKQLKEDYFKKIECFDSVEISGVEDRFNASLGTYH | |
| | DLLKIIKDKDFLDNEENEDILEDIVLTLTLFEDKEMIEERLKKYAHLFDDKVMKQLKRRRYTGWGRLSRKLINGIRDKQSGKTILDFLKSDGFANRNFMQLIHDDSLTFKEDIQKAQVS | |
| | GQGDSLHEHIANLAGSPAIKKGILQTVKVVDELVKVMGRHKPENIVIEMARENQTTQKGQKNSRERMKRIEEGIKELGSDILKEYPVENTQLQNEKLYLYYLQNGRDMYVDQELDINRL | |
| | SDYDVDHIVPQSFLKDDSIDNKVLTRSDKNRGKSDNVPSEEVVKKMKNYWKQLLNAKLITQRKFDNLTKAERGGLSELDKAGFIKRQLVETRQITKHVAQILDSRMNTKYDENDKLIRE | |
| | VRVITLKSKLVSDFRKDFQFYKVREINNYHHAHDAYLNAVVGTALIKKYPKLESEFVYGDYKVYDVRKMIAKSEQEIGKATAKYFFYSNIMNFFKTEITLANGEIRKRPLIETNGETGE | |
| | IVWDKGRDFATVRKVLSMPQVNIVKKTEVQTGGFSKESILPKRNSDKLIARKKDWDPKKYGGFDSPTVAYSVLVVAKVEKGKSKKLKSVKELLGITIMERSSFEKNPIDFLEAKGYKEV | |
| | RKDLIIKLPKYSLFELENGRKRMLASAGELQKGNELALPSKYVNFLYLASHYEKLKGSPEDNEQKQLFVEQHKHYLDEIIEQISEFSKRVILADANLDKVLSAYNKHRDKPIREQAENI | |
| | IHLFTLTNLGAPAAFKYFDTTIDRKRYTSTKEVLDATLIHQSITGLYETRIDLSQLGGD | |
| 174 | MDKKYSIGLDIGTNSVGWAVITDDYKVPSKKFKVLGNTDRHSIKKNLIGALLFDSGETAEATRLKRTARRRYTRRKNRICYLQEIFSNEMAKVDDSFFHRLEESFLVEEDKKHERHPIF | WP_038431314.1 |
| | GNIVDEVAYHEKYPTIYHLRKKLADSTDKADLRLIYLALAHMIKFRGHFLIEGDLNPDNSDVDKLFIQLVQTYNQLFEENPINASRVDAKAILSARLSKSRRLENLIAQLPGEKKNGLF | [Streptococcus |
| | GNLIALSLGLTPNFKSNFDLAEDAKLQLSKDTYDDDLDNLLAQIGDQYADLFLAAKNLSDATLLSDILRVNSEITKAPLSASMIKRYDEHHQDLTLLKALVRQQLPEKYKEIFFDQSKN | pyogenes] |
| | GYAGYIDGGASQEEFYKFIKPILEKMDGTEELLAKLNREDLLRKQRTFDNGSIPHQIHLGELHAILRRQEDFYPFLKDNREKIEKILTFRIPYYVGPLARGNSRFAWMTRKSEETITPW | |
| | NFEEVVDKGASAQSFIERMTNFDKNLPNEKVLPKHSLLYEYFTVYNELTKVKYVTEGMRKPAFLSGEQKKAIVDLLFKTNRKVTVKQLKEDYFKKIECFDSVEISGVEDRFNASLGTYH | |
| | DLLKIIKDKDFLDNEENEDILEDIVLTLTLFEDREMIEERLKTYAHLFDDKVMKQLKRRRYTGWGRLSRKLINGIRDKQSGKTILDFLKSDGFANRNFMQLIHDDSLTFKEDIQKAQVS | |
| | GQGDSLHEHIANLAGSPAIKKGILQTVKVVDELVKVMGRHKPENIVIEMARENQTTQKGQKNSRERMKRIEEGIKELGSDILKEYPVENTQLQNEKLYLYYLQNGRDMYVDQELDINRL | |
| | SDYDVDHIVPQSFLKDDSIDNKVLTRSDKNRGKSDNVPSEEVVKKMKNYWRQLLNAKLITQRKFDNLTKAERGGLSELDKAGFIKRQLVETRQITKHVAQILDSRMNTKYDENDKLIRE | |
| | VKVITLKSKLVSDFRKDFQFYKVREINNYHHAHDAYLNAVVGTALIKKYPKLESEFVYGDYKVYDVRKMIAKSEQEIGKATAKYFFYSNIMNFFKTEITLANGEIRKRPLIETNGETGE | |
| | IVWDKGRDFATVRKVLSMPQVNIVKKTEVQTGGFSKESILPKRNSDKLIARKKDWDPKKYGGFDSPTVAYSVLVVAKVEKGKSKKLKSVKELLGITIMERSSFEKNPIDFLEAKGYKEV | |
| | RKDLIIKLPKYSLFELENGRKRMLASAGELQKGNELALPSKYVNFLYLASHYEKLKGSPEDNEQKQLFVEQHKHYLDEIIEQISEFSKRVILADANLDKVLSAYNKHRDKPIREQAENI | |
| | IHLFTLTNLGAPAAFKYFDTTIDRKRYTSTKEVLDATLIHQSITGLYETRIDLSQLGGD | |
| 175 | MDKKYSIGLDIGTNSVGWAVITDDYKVPSKKFKVLGNTDRHSIKKNLIGALLFDSGETAEATRLKRTARRRYTRRKNRICYLQEIFSNEMAKVDDSFFHRLEESFLVEEDKKHERHPIF | WP_031488318.1 |
| | GNIVDEVAYHEKYPTIYHLRKKLADSTDKADLRLIYLALAHMIKFRGHFLIEGDLNPDNSDVDKLFIQLVQTYNQLFEENPINASRVDAKAILSARLSKSRRLENLIAQLPGEKRNGLF | [Streptococcus |
| | GNLIALSLGLTPNFKSNFDLAEDAKLQLSKDTYDDDLDNLLAQIGDQYADLFLAAKNLSDAILLSDILRVNSEITKAPLSASMIKRYDEHHQDLTLLKALVRQQLPEKYKEIFFDQSKN | pyogenes] |
| | GYAGYIDGGASQEEFYKFIKPILEKMDGTEELLAKLNREDLLRKQRTFDNGSIPHQIHLGELHAILRRQEDFYPFLKDNREKIEKILTFRIPYYVGPLARGNSRFAWMTRKSEETITPW | |
| | NFEEVVDKGASAQSFIERMTNFDKNLPNEKVLPKHSLLYEYFTVYNELTKVKYVTEGMRKPEFLSGEQKKAIVDLLFKTNRKVTVKQLKEDYFKKIECFDSVEISGVEDRFNASLGTYH | |
| | DLLKIIKDKDFLDNEENEDILEDIVLTLTLFEDREMIEERLKTYAHLFDDKVMKQLKRRRYTGWGRLSRKLINGIRDKQSGKTILDFLKSDGFANRNFMQLIHDDSLTFKEDIQKAQVS | |
| | GQGDSLHEHIANLAGSPAIKKGILQTVKVVDELVKVMGRHKPENIVIEMARENQTTQKGQKNSRERMKRIEEGIKELGSDILKEYPVENTQLQNEKLYLYYLQNGRDMYVDQELDINRL | |
| | SDYDVDHIVPQSFIKDDSIDNKVLTRSDKNRGKSDNVPSEEVVKKMKNYWKQLLNAKLITQRKFDNLTKAERGGLSELDKAGFIKRQLVETRQITKHVAQILDSRMNTKYDENDKLIRE | |
| | VKVITLKSKLVSDFRKDFQFYKVREINNYHHAHDAYLNAVVGTALIKKYPKLESEFVYGDYKVYDVRKMIAKSEQEIGKATAKYFFYSNIMNFFKTEITLANGEIRKRPLIETNGETGE | |
| | IVWDKGRDFATVRKVLSMPQVNIVKKTEVQTGGFSKESILPKRNSDKLIARKKDWDPKKYGGFDSPTVAYSVLVVAKVEKGKSKKLKSVKELLGITIMERSSFEKNPIDFLEAKGYKEV | |
| | RKDLIIKLPKYSLFELENGRKRMLASAGELQKGNELALPSKYVNFLYLASHYEKLKGSPEDNEQKQLFVEQHKHYLDEIIEQISEFSKRVILADANLDKVLSAYNKHRDKPIREQAENI | |
| | IHLFTLTNFGAPAAFIYFDTTIGRNRYKSIKEVLDATLIHQSITGLYETRIDLSQLGGD | |
| 176 | MDKKYSIGLDIGTNSVGWAVITDDYKVPSKKFKVLGNTDRHSIKKNLIGALLFDSGETAEATRLKRTARRRYTRRKNRICYLQEIFSNEMAKVDDSFFHRLEESFLVEEDKKHERHPIF | WP_038432938.1 |
| | GNIVDEVAYHEKYPTIYHLRKKLADSTDKVDLRLIYLALAHMIKFRGHFLIEGDLNPDNSDVDKLFIQLVQTYNQLFEENPINASRVDAKAILSARLSKSRRLENLIAQLPGEKKNGLF | [Streptococcus |
| | GNLIALSLGLTPNFKSNFDLAEDTKLQLSKDTYDDDLDNLLAQIGDQYADLFLAAKNLSDAILLSDILRVNSEITKAPLSASMIKRYDEHHQDLTLLKALVRQQLPEKYKEIFFDQSKN | pyogenes] |
| | GYAGYIDGGASQEEFYKFIKPILEKMDGTEELLAKLNREDLLRKQRTFDNGSIPYQIHLGELHAILRRQEDFYPFLKDNREKIEKILTFRIPYYVGPLARGNSRFAWMTRKSEETITPW | |
| | NFEEVVDKGASAQSFIERMTNFDKNLPNEKVLPKHSLLYEYFTVYNELTKVKYVTEGMRKPAFLSGEQKKAIVDLLFKTNRKVTVKQLKEDYFKKIECFDSVEISGVEDRFNTSLGTYH | |
| | DLLKIIKDKDFLDNEENEDILEDIVLTLTLFEDKEMIEERLKKYANLFDDKVMKQLKRRHYTGWGRLSRKLINGIRDKQSGKTILDFLKSDGFANRNFMQLINDDSLTFKEAIQKAQVS | |
| | GQGHSLHEQIANLAGSPAIKKGILQTVKIVDELVKVMGHKPENIVIEMARENQTTQKGQKNSRERMKRIEEGIKELGSQILKEHPVENTQLQNEKLYLYYLQNGRDMYVDQELDINRLS | |
| | DYDVDHIVPQSFLKDDSIDNKVLTRSDKNRGKSDNVPSEEVVKKMKNYWRQLLNAKLITQRKFDNLTKAERGGLSELDKAGFIKRQLVETRQITKHVAQILDSRMNTKYDENDKLIREV | |
| | KVITLKSKLVSDFRKDFQFYKVREINNYHHAHDAYLNAVVGTALIKKYPKLESEFVYGDYKVYDVRKMIAKSEQEIGKATAKYFFYSNIMNFFKTEITLANGEIRKRPLIETNGETGEI | |
| | VWDKGRDFATVRKVLSMPQVNIVKKTEVQTGGFSKESILPKRNSDKLIARKKDWDPKKYGGFDSPTVAYSVLVVAKVEKGKSKKLKSVKELLGITIMERSSFEKNPIDFLEAKGYKEVR | |
| | KDLIIKLPKYSLFELENGRKRMLASAGELQKGNELALPSKYVNFLYLASHYEKLKGSPEDNEQKQLFVEQHKHYLDEIIEQISEFSKRVILADANLDKVLSAYNKHRDKPIREQAKNII | |
| | HLFTLTNLGAPAAFKYFDTTIERNRYKSIKEVLDATLIHQSITGLYETRIDLSQLGGD | |
| 177 | MDKKYSIGLDIGTNSVGWAVITDDYKVPSKKFKVLGNTDRHSIKKNLIGALLFDSGETAEATRLKRTARRRYTRRKNRICYLQEIFSNEMAKVDDSFFHRLEESFLVEEDKKHERHPIF | WP_032462016.1 |
| | GNIVDEVAYHEKYPTIYHLRKKLVDSTDKADLRLIYLALAHMIKFRGHFLIEGDLNPDNSDVDKLFIQLVQTYNQLFEENPINANGVDAKAILSARLSKSRRLENLIAQLPGEKKNGLF | [Streptococcus |
| | GNLIALSLGLTPNFKSNFDLAEDAKLQLSKDTYDDDLDNLLAQIGDQYADLFLAAKNLSDAILLSDILRVNTEITKAPLSASMIKRYDEHHQDLTLLKALVRQQLPEKYKEIFFDQSKN | pyogenes] |
| | GYAGYIDGGASQEEFYKFIKPILEKMDGTEELLVKLNREDLLRKQRTFDNGSIPHQIHLGELHAILRRQEDFYPFLKDNREKIEKILTFRIPYYVGPLARGNSRFAWMTRKSEETITPW | |
| | NFEEVVDKGASAQSFIERMTNFDKNLPNEKVLPKHSLLYEYFTVYNELTKVKYVTEGMRKPAFLSGEQKKAIVDLLFKTNRKVTVKQLKEDYFKKIECFDSVEISGVEDRFNASLGTYH | |
| | DLLKIIKDKDFLDNEENEDILEDIVLTLTLFEDREMIEERLKTYAHLFDDKVMKQLKRRRYTGWGRLSRKLINGIRDKQSGKTILDFLKSDGFANRNFMQLIHDDSLTFKEDIQKAQVS | |
| | GQGDSLHEHIANLAGSPAIKKGILQTVKVVDELVKVMGRHKPENIVIEMARENQTTQKGQKNSRERMKRIEEGIKELGSQILKEHPVENTQLQNEKLYLYYLQNGRDMYVDQELDINRL | |
| | SDYDVDHIVPQSFLKDDSIDNKVLTRSDKNRGKSDNVPSEEVVKKMKNYWRQLLNAKLITQRKFDNLTKAERGGLSELDKAGFIKRQLVETRQITKHVAQILDSRMNTKYDENDKLIRE | |
| | VKVITLKSKLVSDFRKDFQFYKVREINNYHHAHDAYLNAVVGTALIKKYPKLESEFVYGDYKVYDVRKMIAKSEQEIGKATAKYFFYSNIMNFFKTEITLANGEIRKRPLIETNGETGE | |
| | IVWDKGRDFATVRKVLSMPQVNIVKKTEVQTGGFSKESILPKRNSDKLIARKKDWDPKKYGGFDSPTVAYSVLVVAKVEKGKSKKLKSVKELLGITIMERSSFEKNPIDFLEAKGYKEV | |
| | KKDLIIKLPKYSLFELENGRKRMLASAGELQKGNELALPSKYVNFLYLASHYEKLKGSPEDNEQKQLFVEQHKHYLDEIIEQISEFSKRVILADANLDKVLSAYNKHRDKPIREQAENI | |
| | IHLFTLTNLGAPAAFKYFDTTIDRKRYTSTKEVLDATLIHQSITGLYETRIDLSQLGGD | |
| 178 | MDKKYSIGLDIGTNSVGWAVITDDYKVPSKKFKVLGNTDRHSIKKNLIGALLFDSGETAEATRLKRTARRRYTRRKNRICYLQEIFSNEMAKVDDSFFHRLEESFLVEEDKKHERHPIF | WP_011284745.1 |
| | GNIVDEVAYHEKYPTIYHLRKKLVDSTDKADLRLIYLALAHMIKFRGHFLIEGDLNPDNSDVDKLFIQLVQTYNQLFEENPINASGVDAKAILSARLSKSRRLENLIAQLPGEKKNGLF | [Streptococcus |
| | GNLIALSLGLTPNFKSNFDLAEDAKLQLSKDTYDDDLDNLLAQIGDQYADLFLAAKNLSDAILLSDILRLNSEITKAPLSASMIKRYDEHHQDLTLLKALVRQQLPEKYKEIFFDQSKN | pyogenes] |
| | GYAGYIDGGASQEEFYKFIKPILEKMDGTEELLAKLNREDLLRKQRTFDNGSIPHQIHLGELHAILRRQEDFYPFLKDNREKIEKILTFRIPYYVGPLARGNSRFAWMTRKSEETITPW | |
| | NFEEVVDKGASAQSFIERMTNFDKNLPNEKVLPKHSLLYEYFTVYNELTKVKYVTEGMRKPAFLSGEQKKAIVDLLFKTNRKVTVKQLKEDYFKKIECFDSVEISGVEDRFNASLGTYH | |
| | DLLKIIKDKDFLDNEENEDILEDIVLTLTLFEDREMIEERLKTYAHLFDDKVMKQLKRRRYTGWGRLSRKLINGIRDKQSGKTILDFLKSDGFANRNFMQLIHDDSLTFKEDIQKAQVS | |
| | GQGDSLHEHIANLAGSPAIKKGILQTVKVVDELVKVMGRHKPENIVIEMARENQTTQKGQKNSRERMKRIEEGIKELGSQILKEHPVENTQLQNEKLYLYYLQNGRDMYVDQELDINRL | |
| | SDYDVDHIVPQSFIKDDSIDNKVLTRSDKNRGKSNNVPSEEVVKKMKNYWRQLLNAKLITQRKFDNLTKAERGGLSELDKAGFIKRQLVETRQITKHVAQILDSRMNTKYDENDKLIRE | |
| | VKVITLKSKLVSDFRKDFQFYKVREINNYHHAHDAYLNAVVGTALIKKYPKLESEFVYGDYKVYDVRKMIAKSEQEIGKATAKYFFYSNIMNFFKTEITLANGEIRKRPLIETNGETGE | |
| | IVWDKGRDFATVRKVLSMPQVNIVKKTEVQTGGFSKESILPKRNSDKLIARKKDWDPKKYGGFDSPTVAYSVLVVAKVEKGKSKKLKSVKELLGITIMERSSFEKNPIDFLEAKGYKEV | |
| | RKDLIVKLPKYSLFELENGRKRMLASAGELQKGNELALPSKYVNFLYLASHYEKLKGSPEDNEQKQLFVEQHKHYLDEIIEQISEFSKRVILADANLDKVLSAYNKHRDKPIREQAENI | |
| | IHLFTLTNLGAPAAFKYFDTTIDRKRYTSTKEVLDATFIHQSITGLYETRIDLSQLGGD | |
| 179 | MDKKYSIGLDIGTNSVGWAVITDDYKVPSKKFKVLGNTDRHSIKKNLIGALLFDSGETAEATRLKRTARRRYTRRKNRICYLQEIFSNEMAKVDDSFFHRLEESFLVEEDKKHERHPIF | WP_011285506.1 |
| | GNIVDEVAYHEKYPTIYHLRKKLVDSTDKADLRLIYLALAHMIKFRGHFLIEGDLNPDNSDVDKLFIQLVQTYNQLFEENPINASGVDAKAILSARLSKSRRLENLIAQLPGEKKNGLF | [Streptococcus |
| | GNLIALSLGLTPNFKSNFDLAEDAKLQLSKDTYDDDLDNLLAQIGDQYADLFLAAKNLSDAILLSDILRVNTEITKAPLSASMIKRYDEHHQDLTLLKALVRQQLPEKYKEIFFDQSKN | pyogenes] |
| | GYAGYIDGGASQEEFYKFIKPILEKMDGTEELLVKLNREDLLRKQRTFDNGSIPHQIHLGELHAILRRQEDFYPFLKDNREKIEKILTFRIPYYVGPLARGNSRFAWMTRKSEETITPW | |
| | NFEEVVDKGASAQSFIERMTNFDKNLPNEKVLPKHSLLYEYFTVYNELTKVKYVTEGMRKPAFLSGEQKKAIVDLLFKTNRKVTVKQLKEDYFKKIECFDSVEISGVEDRFNASLGTYH | |
| | DLLKIIKDKDFLDNEENEDILEDIVLTLTLFEDREMIEERLKTYAHLFDDKVMKQLKRRRYTGWGRLSRKLINGIRDKQSGKTILDFLKSDGFANRNFMQLIHDDSLTFKEDIQKAQVS | |
| | GQGDSLHEHIANLAGSPAIKKGILQTVKVVDELVKVMGRHKPENIVIEMARENQTTQKGQKNSRERMKRIEEGIKELGSQILKEHPVENTQLQNEKLYLYYLQNGRDMYVDQELDINRL | |
| | SDYDVDHIVPQSFLKDDSIDNKVLTRSDKNRGKSDNVPSEEVVKKMKNYWRQLLNAKLITQRKFDNLTKAERGGLSELDKAGFIKRQLVETRQITKHVAQILDSRMNTKYDENDKLIRE | |
| | VKVITLKSKLVSDFRKDFQFYKVREINNYHHAHDAYLNAVVGTALIKKYPKLESEFVYGDYKVYDVRKMIAKSEQEIGKATAKYFFYSNIMNFFKTEITLANGEIRKRPLIETNGETGE | |
| | IVWDKGRDFATVRKVLSMPQVNIVKKTEVQTGGFSKESILPKRNSDKLIARKKDWDPKKYGGFDSPTVAYSVLVVAKVEKGKSKKLKSVKELLGITIMERSSFEKNPIDFLEAKGYKEV | |
| | KKDLIIKLPKYSLFELENGRKRMLASAGELQKGNELALPSKYVNFLYLASHYEKLKGSPEDNEQKQLFVEQHKHYLDEIIEQISEFSKRVILADANLDKVLSAYNKHRDKPIREQAENI | |
| | IHLFTLTNLGAPAAFKYFDTTIDRKRYTSTKEVLDATLIHQSITGLYETRIDLSQLGGD | |
| 180 | MDKKYSIGLDIGTNSVGWAVITDDYKVPSKKFKVLGNTDRHSIKKNLIGALLFDSGETAEATRLKRTARRRYTRRKNRICYLQEIFSNEMAKVDDSFFHRLEESFLVEEDKKHERHPIF | WP_020905136.1 |
| | GNIVDEVAYHEKYPTIYHLRKKLVDSTDKADLRLIYLALAHMIKFRGHFLIEGDLNPDNSDVDKLFIQLVQTYNQLFEENPINASGVDAKAILSARLSKSRRLENLIAQLPGEKKNGLF | [Streptococcus |
| | GNLIALSLGLTPNFKSNFDLAEDAKLQLSKDTYDDDLDNLLAQIGDQYADLFLAAKNLSDAILLSDILRLNSEITKAPLSASMIKRYDEHHQDLTLLKALVRQQLPEKYKEIFFDQSKN | pyogenes] |
| | GYAGYIDGGASQEEFYKFIKPILEKMDGTEELLAKLNREDLLRKQRTFDNGSIPHQIHLGELHAILRRQEDFYPFLKDNREKIEKILTFRIPYYVGPLARGNSRFAWMTRKSEETITPW | |
| | NFEEVVDKGASAQSFIERMTNFDKNLPNEKVLPKHSLLYEYFTVYNELTKVKYVTEGMRKPAFLSGEQKKAIVDLLFKTNRKVTVKQLKEDYFKKIECFDSVEISGVEDRFNASLGTYH | |
| | DLLKIIKDKDFLDNEENEDILEDIVLTLTLFEDREMIEERLKTYAHLFDDKVMKQLKRRRYTGWGRLSRKLINGIRDKQSGKTILDFLKSDGFANRNFMQLIHDDSLTFKEDIQKAQVS | |
| | GQGDSLHEHIANLAGSPAIKKGILQTVKVVDELVKVMGRHKPENIVIEMARENQTTQKGQKNSRERMKRIEEGIKELGSQILKEHPVENTQLQNEKLYLYYLQNGRDMYVDQELDINRL | |
| | SDYDVDHIVPQSFIKDDSIDNKVLTRSDKNRGKSDNVPSEEVVKKMKNYWRQLLNAKLITQRKFDNLTKAERGGLSELDKAGFIKRQLVETRQITKHVAQILDSRMNTKYDENDKLIRE | |
| | VKVITLKSKLVSDFRKDFQFYKVREINNYHHAHDAYLNAVVGTALIKKYPKLESEFVYGDYKVYDVRKMIAKSEQEIGKATAKYFFYSNIMNFFKTEITLANGEIRKRPLIETNGETGE | |
| | IVWDKGRDFATVRKVLSMPQVNIVKKTEVQTGGFSKESILPKRNSDKLIARKKDWDPKKYGGFDSPTVAYSVLVVAKVEKGKSKKLKSVKELLGLTIMERSSFEKNPIDFLEAKGYKEV | |
| | KKDLIIKLPKYSLFELENGRKRMLASAGELQKGNELALPSKYVNFLYLASHYEKLKGSPEDNEQKQLFVEQHKHYLDEIIEQISEFSKRVILADANLDKVLSAYNKHRDKPIREQAENI | |
| | IHLFTLTNLGAPAAFKYFDTTIDRKRYTSTKEVLDATLIHQSITGLYETRIDLSQLGGD | |
| 181 | MDKKYSIGLDIGTNSVGWAVITDDYKVPSKKFKVLGNTDRHSIKKNLIGALLFDSGETAEATRLKRTARRRYTRRKNRICYLQEIFSNEMAKVDDSFFHRLEESFLVEEDKKHERHPIF | WP_030125963.1 |
| | GNIVDEVAYHEKYPTIYHLRKKLVDSTDKADLRLIYLALAHMIKFRGHFLIEGDLNPDNSDVDKLFIQLVQTYNQLFEENPINASGVDAKAILSARLSKSRRLENLIAQLPGEKKNGLF | [Streptococcus |
| | GNLIALSLGLTPNFKSNFDLAEDAKLQLSKDTYDDDLDNLLAQIGDQYADLFLAAKNLSDAILLSDILRVNTEITKASLSASMIKRYDEHHQDLTLLKALVRQQLPEKYKEIFFDQSKN | pyogenes] |
| | GYAGYIDGGASQEEFYKFIKPILEKMDGTEELLVKLNREDLLRKQRTFDNGSIPHQIHLGELHAILRRQEDFYPFLKDNREKIEKILTFRIPYYVGPLARGNSRFAWMTRKSEETITPW | |
| | NFEEVVDKGASAQSFIERMTNFDKNLPNEKVLPKHSLLYEYFTVYNELTKVKYVTEGMRKPAFLSGEQKKAIVDLLFKTNRKVTVKQLKEDYFKKIECFDSVEISGVEDRFNASLGTYH | |
| | DLLKIIKDKDFLDNEENEDILEDIVLTLTLFEDREMIEERLKTYAHLFDDKVMKQLKRRRYTGWGRLSRKLINGIRDKQSGKTILDFLKSDGFANRNFMQLIHDDSLTFKEDLQKAQVS | |
| | GQGDSLHEHIANLAGSPAIKKGILQTVKVVDELVKVMGRHKPENIVIEMARENQTTQKGQKNSRERMKRIEEGIKELGSDILKEYPVENTQLQNEKLYLYYLQNGRDMYVDQELDINRL | |
| | SDYDVDHIVPQSFIKDDSIDNKVLTRSDKNRGKSDNVPSEEVVKKMKNYWRQLLNAKLITQRKFDNLTKAERGGLSELDKAGFIKRQLVETRQITKHVAQILDSRMNTKYDENDKLIRE | |
| | VKVITLKSKLVSDFRKDFQFYKVREINNYHHAHDAYLNAVVGTALIKKYPKLESEFVYGDYKVYDVRKMIAKSEQEIGKATAKYFFYSNIMNFFKTEITLANGEIRKRPLIETNGETGE | |
| | IVWDKGRDFATVRKVLSMPQVNIVKKTEVQTGGFSKESILPKRNSDKLIARKKDWDPKKYGGFDSPTVAYSVLVVAKVEKGKSKKLKSVKELLGITIMERSSFEKNPIDFLEAKGYKEV | |
| | RKDLIIKLPKYSLFELENGRKRMLASAGELQKGNELALPSKYVNFLYLASHYEKLKGSPEDNEQKQLFVEQHKHYLDEIIEQISEFSKRVILADANLDKVLSAYNKHRDKPIREQAENI | |
| | IHLFTLTNLGAPAAFKYFDTTIGRNRYKSIKEVLDATLIHQSITGLYETRIDLSQLGGD | |
| 182 | MDKKYSIGLDIGTNSVGWAVITDDYKVPSKKFKVLGNTDRHSIKKNLIGALLFDSGETAEATRLKRTARRRYTRRKNRIRYLQEIFSSEMSKVDDSFFHRLEESFLVEEDKKHERHPIF | WP_012767106.1 |
| | GNIVDEVAYHEKYPTIYHLRKKLADSTDKADLRLIYLALAHMIKFRGHFLIEGDLNPDNSDMDKLFIQLVQTYNQLFEENPINASRVDAKAILSARLSKSRRLENLIAQLPGEKRNGLF | [Streptococcus |
| | GNLIALSLGLTPNFKSNFDLAEDAKLQLSKDTYDDDLDNLLAQIGDQYADLFLAAKNLSDAILLSDILRVNSEITKAPLSASMIKRYDEHHQDLTLLKALVRQQLPEKYKEIFFDQSKN | dysgalactiae] |
| | GYAGYIDGGASQEEFYKFIKPILEKMDGTEELLAKLNREDLLRKQRTFDNGSIPHQIHLGELHAILRRQEDFYPFLKDNREKIEKILTFRIPYYVGPLARGNSRFAWMTRKSEETITPW | |
| | NFEEVVDKGASAQSFIERMTNFDKNLPNEKVLPKHSLLYEYFTVYNELTKVKYVTEGMRKPEFLSGKQKEAIVDLLFKTNRKVTVKQLKEDYFKKIECFDSVEISGVEDRFNASLGTYH | |
| | DLLKIIKDKDFLDNEENEDILEDIVLTLTLFEDKEMIEERLKKYANLFDDKVMKQLKRRHYTGWGRLSRKLINGIRDKQSGKTILDFLKSDGFANRNFMQLINDDSLTFKEAIQKAQVS | |
| | GQGHSLHEQIANLAGSPAIKKGILQSVKVVDELVKVMGHKPENIVIEMARENQTTQKGQKNSRERMKRIEEGIKELGSQILKEHPVENTQLQNEKLYLYYLQNGRDMYVDQELDINRLS | |
| | DYDVDHIVPQSFIKDDSIDNKILTRSDKNRGKSDNVPSEEVVKKMKNYWRQLLNAKLITQRKFDNLTKAERGGLSELDKAGFIKRQLVETRQITKHVAQILDSRMNTKYDENDKLIREV | |
| | KVITLKSKLVSDFRKDFQFYKVREINNYHHAHDAYLNAVVGTALIKKYTKLESEFVYGDYKVYDVRKMIAKSEQEIGKATAKRFFYSNIMNFFKTEITLANGEIRKRPLIETNEETGEI | |
| | VWDKGRDFATVRKVLSMPQVNIVKKTEVQTGALTNESIYARGSFDKLISRKHRFESSKYGGFGSPTVTYSVLVVAKSKVQDGKVKKIKTGKELIGMTLLDKLVFEKNPLKFIEDKGYGN | |
| | VQIDKCIKLPKYSLFEFENGTRRMLASVMANNNSRGDLQKANEMFLPAKLVTLLYHAHKIESSKELEHEAYILDHYNDLYQLLSYIERFASLYVDVEKNISKVKELFSNIESYSISEIC | |
| | SSVINLLTLTASGAPADFKFLGTTIPRKRYGSPQSILSSTLIHQSITGLYETRIDLSQLGGD | |
| 183 | MDKKYSIGLDIGTNSVGWAVITDDYKVPSKKFKVLGNTDRHSIKKNLIGALLFDSGETAEATRLKRTARRRYTRRKNRIRYLQEIFSSEMSKVDDSFFHRLEESFLVEEDKKHERHPIF | WP_015017095.1 |
| | GNIVDEVAYHEKYPTIYHLRKKLADSTDKADLRLIYLALAHMIKFRGHFLIEGDLNPDNSDMDKLFIQLVQTYNQLFEENPINASRVDAKAILSARLSKSRRLENLIAQLPGEKRNGLF | [Streptococcus |
| | GNLIALSLGLTPNFKSNFDLAEDAKLQLSKDTYDDDLDNLLAQIGDQYADLFLAAKNLSDAILLSDILRVNSEITKAPLSASMIKRYDEHHQDLTLLKALVRQQLPEKYKEIFFDQSKN | dysgalactiae] |
| | GYAGYIDGGASQEEFYKFIKPILEKMDGTEELLAKLNREDLLRKQRTFDNGSIPHQIHLGELHAILRRQEDFYPFLKDNREKIEKILTFRIPYYVGPLARGNSRFAWMTRKSEETITPW | |
| | NFEEVVDKGASAQSFIERMTNFDKNLPNEKVLPKHSLLYEYFTVYNELTKVKYVTEGMRKPEFLSGKQKEAIVDLLFKTNRKVTVKQLKEDYFKKIECFDSVEISGVEDRFNASLGTYH | |
| | DLLKIIKDKDFLDNEENEDILEDIVLTLTLFEDKEMIEERLKTYAHLFDDKVMKQLKRRHYTGWGRLSRKLINGIRDKQSGKTILDFLKSDGFANRNFIQLIHDDSLTFKEAIQKAQVS | |
| | GQGHSLHEQIANLAGSPAIKKGILQSVKVVDELVKVMGHKPENIVIEMARENQTTQKGQKNSRERMKRIEEGIKELGSQILKEHPVENTQLQNEKLYLYYLQNGRDMYVDQELDINRLS | |
| | DYDVDHIVPQSFIKDDSIDNKVLTRSDKNRGKSDDVPSEEVVKKMKNYWRQLLNAKLITQRKFDNLTKAERGGLSELDKAGFIKRQLVETRQITKHVAQILDSRMNTKYDENDKLIREV | |
| | KVITLKSKLVSDFRKDFQFYKVREINNYHHAHDAYLNAVVGTALIKKYPKLESEFVYGDYKVYDVRKMIAKSEQEIGKATAKRFFYSNIMNFFKTEITLANGEIRKRPLIETNEETGEI | |
| | VWNKGRDFATVRKVLSMPQVNIVKKTEVQTGALTNESIYARGSFDKLISRKHRFESSKYGGFGSPTVTYSVLVVAKSKVQDGKVKKIKTGKELIGITLLDKLVFEKNPLKFIEDKGYGN | |
| | VQIDKCIKLPKYSLFEFENGTRRMLASVMANNNSRGDLQKANEMFLPAKLVTLLYHAHKIESSKELEHEAYILDHYNDLYQLLSYIERFASLYVDVEKNISKVKELFSNIESYSISEIC | |
| | SSVINLLTLTASGAPADFKFLGTTIPRKRYGSPQSILSSTLIHQSITGLYETRIDLSQLGGD | |
| 184 | MDKKYSIGLDIGTNSVGWAVITDDYKVPSKKFKVLGNTDRHSIKKNLIGALLFDSGETAEATRLKRTARRRYTRRKNRIRYLQEIFSSEMSKVDDSFFHRLEESFLVEEDKKHERHPIF | WP_015057649.1 |
| | GNIVDEVAYHEKYPTIYHLRKKLADSTDKADLRLIYLALAHMIKFRGHFLIEGDLNPDNSDMDKLFIQLVQTYNQLFEENPINASRVDAKAILSARLSKSRRLENLIAQLPGEKRNGLF | [Streptococcus |
| | GNLIALSLGLTPNFKSNFDLAEDAKLQLSKDTYDDDLDNLLAQIGDQYADLFLAAKNLSDAILLSDILRVNSEITKAPLSASMIKRYDEHHQDLTLLKALVRQQLPEKYKEIFFDQSKN | dysgalactiae] |
| | GYAGYIDGGASQEEFYKFIKPILEKMDGTEELLAKLNREDLLRKQRTFDNGSIPHQIHLGELHAILRRQEDFYPFLKDNREKIEKILTFRIPYYVGPLARGNSRFAWMTRKSEETITPW | |
| | NFEEVVDKGASAQSFIERMTNFDKNLPNEKVLPKHSLLYEYFTVYNELTKVKYVTEGMRKPEFLSGKQKEAIVDLLFKTNRKVTVKQLKEDYFKKIECFDSVEISGVEDRFNASLGTYH | |
| | DLLKIIKDKDFLDNEENEDILEDIVLTLTLFEDKEMIEERLKKYANLFDDKVMKQLKRRHYTGWGRLSRKLINGIRDKQSGKTILDFLKSDGFANRNFMQLINDDSLTFKEAIQKAQVS | |
| | GQGHSLHEQIANLAGSPAIKKGILQSVKVVDELVKVMGHKPENIVIEMARENQTTQKGQKNSRERMKRIEEGIKELGSQILKEHPVENTQLQNEKLYLYYLQNGRDMYVDQELDINRLS | |
| | DYDVDHIVPQSFIKDDSIDNKVLTRSDKNRGKSDNVPSEEVVKKMKNYWRQLLNAKLITQRKFDNLTKAERGGLSELDKAGFIKRQLVETRQITKHVAQILDSRMNTKYDENDKLIREV | |
| | KVITLKSKLVSDFRKDFQFYKVREINNYHHAHDAYLNAVVGTALIKKYPKLESEFVYGDYKVYDVRKMIAKSEQEIGKATAKRFFYSNIMNFFKTEITLANGEIRKRPLIETNEETGEI | |
| | VWDKGRDFATVRKVLSMPQVNIVKKTEVQTGALTNESIYARGSFDKLISRKHRFESSKYGGFGSPTVTYSVLVVAKSKVQDGKVKKIKTGKELIGITLLDKLVFEKNPLKFIEDKGYGN | |
| | VQIDKCIKLPKYSLFEFENGTRRMLASVMANNNSRGDLQKANEMFLPAKLVTLLYHAHKIESSKELEHEAYILDHYNDLYQLLSYIERFASLYVDVEKNISKVKELFSNIESYSISEIC | |
| | SSVINLLTLTASGAPADFKFLGTTIPRKRYGSPQSILSSTLIHQSITGLYETRIDLSQLGGD | |
| 185 | MDKKYSIGLDIGTNSVGWAVITDDYKVPSKKFKVLGNTDRHSIKKNLIGALLFDSGETAEATRLKRTARRRYTRRKNRIRYLQEIFSSEMSKVDDSFFHRLEESFLVEEDKKHERHPIF | WP_048327215.1 |
| | GNIVDEVAYHEKYPTIYHLRKKLADSTDKADLRLIYLALAHMIKFRGHFLIEGDLNPDNSDMDKLFIQLVQTYNQLFEENPINASRVDAKAILSARLSKSRRLENLIAQLPGEKRNGLF | [Streptococcus |
| | GNLIALSLGLTPNFKSNFDLAEDAKLQLSKDTYDDDLDNLLAQIGDQYADLFLAAKNLSDAILLSDILRVNSEITKAPLSASMIKRYDEHHQDLTLLKALVRQQLPEKYKEIFFDQSKN | dysgalactiae] |
| | GYAGYIDGGASQEEFYKFIKPILEKMDGTEELLAKLNREDLLRKQRTFDNGSIPHQIHLGELHAILRRQEDFYPFLKDNREKIEKILTFRIPYYVGPLARGNSRFAWMTRKSEETITPW | |
| | NFEEVVDKGASAQSFIERMTNFDKNLPNEKVLPKHSLLYEYFTVYNELTKVKYVTEGMRKPEFLSGKQKEAIVDLLFKTNRKVTVKQLKEDYFKKIECFDSVEISGVEDRFNASLGTYH | |
| | DLLKIIKDKDFLDNEENEDILEDIVLTLTLFEDKEMIEERLKTYAHLFDDKVMKQLKRRHYTGWGRLSRKLINGIRDKQSGKTILDFLKSDGFANRNFIQLIHDDSLTFKEAIQKAQVS | |
| | GQGHSLHEQIANLAGSPAIKKGILQSVKVVDELVKVMGHKPENIVIEMARENQTTQKGQKNSRERMKRIEEGIKELGSQILKEHPVENTQLQNEKLYLYYLQNGRDMYVDQELDINRLS | |
| | DYDVDHIVPQSFIKDDSIDNKVLTRSDKNRGKSDDVPSEEVVKKMKNYWRQLLNAKLITQRKFDNLTKAERGGLSELDKAGFIKRQLVETRQITKHVAQILDSRMNTKYDENDKLIREV | |
| | KVITLKSKLVSDFRKDFQFYKVREINNYHHAHDAYLNAVVGTALIKKYPKLESEFVYGDYKVYDVRKMIAKSEQEIGKATAKRFFYSNIMNFFKTEITLANGEIRKRPLIETNEETGEI | |
| | VWDKGRDFATVRKVLSMPQVNIVKKTEVQTGALTNESIYARGSFDKLISRKHRFESSKYGGFGSPTVTYSVLVVAKCKVQDGKVKKIKTGKELIGITLLDKLVFEKNPLKFIEDKGYGN | |
| | VQIDKCIKLPKYSLFEFENGTRRMLASVMANNNSRGDLQKANEMFLPAKLVTLLYHAHKIESSKELEHEAYILDHYNDLYQLLSYIERFASLYVDVEKNISKVKELFSNIESYSISEIC | |
| | SSVINLLTLTASGAPADFKFLGTTIPRKRYGSPQSILSSTLIHQSITGLYETRIDLSQLGGD | |
| 186 | MDKKYSIGLDIGTNSVGWAVITDDYKVPSKKFKVLGNTDRHSIKKNLIGALLFDSGETAEATRLKRTARRRYTRRKNRIRYLQEIFSSEMSKVDDSFFHRLEESFLVEEDKKHERHPIF | WP_014612333.1 |
| | GNIVDEVAYHEKYPTIYHLRKKLADSTDKADLRLIYLALAHMIKFRGHFLIEGDLNPDNSDVDKLFIQLVQTYNQLFEEKPINASGVDAKAILSARLSKSKRLENLIAQLPGEKKNGLF | [Streptococcus |
| | GNLIALSLGLTPNFKSNFDLAEDAKLQLSKDTYDDDLDNLLAQIGNQYADLFLAAKNLSDAILLSDILRVNSEITKAPLSASMIKRYDEHHQDLTLLKALVRQQLPEKYKEIFFDQSKN | dysgalactiae] |
| | GYAGYIDGGASQEEFYKFIKPILEKMDGTEELLAKLNREDLLRKQRTFDNGSIPHQIHLGELHAILRRQEDFYPFLKDNREKIEKILTFRIPYYVGPLARGNSRFAWMTRKSEETITPW | |
| | NFEEVVDKGASAQSFIERMTNFDKNLPNEKVLPKHSLLYEYFTVYNELTKVKYVTEGMRKPEFLSGKQKEAIVDLLFKTNRKVTVKQLKEDYFKKIECFDSVEISGVEDRFNASLGTYH | |
| | DLLKIIKDKDFLDNEENEDILEDIVLTLTLFEDKEMIEERLKKYANLFDDKVMKQLKRRHYTGWGRLSRKLINGIRDKQSGKTILDFLKSDGFANRNFMQLINDDSLTFKEAIQKAQVS | |
| | GQGHSLHEQIANLAGSPAIKKGILQSVKVVDELVKVMGHKPENIVIEMARENQTTQKGQKNSRERMKRIEEGIKELGSQILKEHPVENTQLQNEKLYLYYLQNGRDMYVDQELDINRLS | |
| | DYDVDHIVPQSFIKDDSIDNKVLTRSDKNRGKSDNVPSEEVVKKMKNYWRQLLNAKLITQRKFDNLTKAERGGLSELDKAGFIKRQLVETRQITKHVAQILDSRMNTKYDENDKLIREV | |
| | KVITLKSKLVSDFRKDFQFYKVREINNYHHAHDAYLNAVVGTALIKKYPKLESEFVYGDYKVYDVRKMIAKSEQEIGKATAKRFFYSNIMNFFKTEITLANGEIRKRPLIETNEETGEI | |
| | VWDKGRDFATVRKVLSMQVNIVKKTEVQTGALTNESIYARGSFDKLISRKHRFESSKYGGFGSPTVTYSVLVVAKSKVQDGKVKKIKTGKELIGITLLDKLVFEKNKPLKFIEDKGYGN | |
| | VQIDKCIKLPKYSLFEFENGTRRMLASVMANNNSRGDLQKANEMFLPAKLVTLLYHAHKIESSKELEHEAYILDHYNDLYQLLSYIERFASLYVDVEKNISKVKELFSNIESYSISEIC | |
| | SSVINLLTLTASGAPADFKFLGTTIPRKRYGSPQSILSSTLIHQSITGLYETRIDLSQLGGD | |
| 187 | MDKKYSIGLDIGTNSVGWAVITDDYKVPSKKFKVLGNTDRHSIKKNLIGALLFGSGETAEATRLKRTARRRYTRRKNRICYLQEIFSNEMAKVDDSFFHRLEESFLVEEDKKHERHPIF | WP_014407541.1 |
| | GNIVDEVAYHEKYPTIYHLRKKLADSTDKADLRLIYLALAHMIKFRGHFLIEGDLNPDNSDVDKLFIQLVQIYNQLFEENPINASRVDAKAILSARLSKSRRLENLIAQLPGEKRNGLF | [Streptococcus |
| | GNLIALSLGLTPNFKSNFDLAEDAKLQLSKDTYDDDLDNLLAQIGDQYADLFLAAKNLSDAILLSDILRVNSEITKAPLSASMIKRYDEHHQDLTLLKALVRQQLPEKYKEIFFDQSKN | pyogenes] |
| | GYAGYIDGGASQEEFYKFIKPILEKMDGTEELLVKLNREDLLRKQRTFDNGSIPHQIHLGELHAILRRQEDFYPFLKDNREKIEKILTFRIPYYVGPLARGNSRFAWMTRKSEETITPW | |
| | NFEEVVDKGASAQSFIERMTNFDKNLPNEKVLPKHSLLYEYFTVYNELTKVKYVTEGMRKPAFLSGEQKKAIVDLLFKTNRKVTVKQLKEDYFKKIECFDSVEISGVEDRFNASLGAYH | |
| | DLLKIIKDKDFLDNEENEDILEDIVLTLTLFEDRGMIEERLKTYAHLFDDKVMKQLKRRRYTGWGRLSRKLINGIRDKQSGKTILDFLKSDGFANRNFMQLIHDDSLTFKEDIQKAQVS | |
| | GQGHSLHEQIANLAGSPAIKKGILQTVKIVDELVKVMGHKPENIVIEMARENQTTQKGQKNSRERMKRIEEGIKELGSQILKEHPVENTQLQNEKLYLYYLQNGRDMYVDQELDINRLS | |
| | DYDVDHIVPQSFIKDDSIDNKVLTRSDKNRGKSDNVPSEEVVKKMKNYWRQLLNAKLITQRKFDNLTKAERGGLSELDKAGFIKRQLVETRQITKHVAQILDSRMNTKYDENDKLIREV | |
| | KVITLKSKLVSDFRKDFQFYKVREINNYHHAHDAYLNAVVGTALIKKYPKLESEFVYGDYKVYDVRKMIAKSEQEIGKATAKYFFYSNIMNFFKTEITLANGEIRKRPLIETNGETGEI | |
| | VWDKGRDFATVRKVLSMPQVNIVKKTEVQTGGFSKESILPKRNSDKLIARKKDWDPKKYGGFDSPTVAYSVLVVAKVEKGKSKKLKSVKELLGITIMERSSFEKNPIDFLEAKGYKEVK | |
| | KDLIIKLPKYSLFELENGRKRMLASAGELQKGNELALPSKYVNFLYLASHYEKLKGSPEDNEQKQLFVEQHKHYLDEIIEQISEFSKRVILADANLDKVLSAYNKHRDKPIREQAENII | |
| | HLFTLTNLGAPAAFKYFDTTIDRKRYTSTKEVLDATLIHQSITGLYETRIDLSQLGGD | |
| 188 | MDKKYSIGLDIGTNSVGWAVITDDYKVPSKKLKGLGNTDRHGIKKNLIGALLFDSGETAEATRLKRTARRRYTRRKNRICYLQEIFSNEMAKVDDSFFHRLEESFLVEEDKKHERHPIF | WP_011054416.1 |
| | GNIVDEVAYHEKYPTIYHLRKKLADSTDKVDLRLIYLALAHMIKFRGHFLIEGDLNPDNSDVDKLFIQLVQTYNQLFEENPINASRVDAKAILSARLSKSRRLENLIAQLPGEKKNGLF | [Streptococcus |
| | GNLIALSLGLTPNFKSNFDLAEDAKLQLSKDTYDDDLDNLLAQIGDQYADLFLAAKNLSDATLLSDILRVNSEITKAPLSASMIKRYDEHHQDLTLLKALVRQQLPEKYKEIFFDQSKN | pyogenes] |
| | GYAGYIDGGASQEEFYKFIKPILEKMDGTEELLAKLNREDLLRKQRTFDNGSIPYQIHLGELHAILRRQEDFYPFLKDNREKIEKILTFRIPYYVGPLARGNSRFAWMTRKSEETITPW | |
| | NFEEVVDKGASAQSFIERMTNFDKNLPNEKVLPKHSLLYEYFTVYNELTKVKYVTEGMRKPAFLSGEQKKAIVDLLFKTNRKVTVKQLKEDYFKKIECFDSVEISGVEDRFNASLGTYH | |
| | DLLKIIKDKDFLDNEENEDILEDIVLTLTLFEDREMIEERLKTYAHLFDDKVMKQLKRRRYTGWGRLSRKLINGIRDKQSGKTILDFLKSDGFANRNFMQLIHDDSLTFKEDIQKAQVS | |
| | GQGDSLHEHIANLAGSPAIKKGILQTVKVVDELVKVMGRHKPENIVIEMARENQTTQKGQKNSRERMKRIEEGIKELGSDILKEYPVENTQLQNEKLYLYYLQNGRDMYVDQELDINRL | |
| | SDYDVDHIVPQSFLKDDSIDNKVLTRSDKNRGKSDNVPSEEVVKKMKNYWRQLLNAKLITQRKFDNLTKAERGGLSELDKVGFIKRQLVETRQITKHVAQILDSRMNTKYDENDKLIRE | |
| | VRVITLKSKLVSDFRKDFQFYKVREINNYHHAHDAYLNAVVGTALIKKYPKLESEFVYGDYKVYDVRKMIAKSEQEIGKATAKYFFYSNIMNFFKTEITLANGEIRKRPLIETNGETGE | |
| | IVWDKGRDFATVRKVLSMPQVNIVKKTEVQTGGFSKESILPKRNSDKLIARKKDWDPKKYGGFDSPTVAYSVLVVAKVEKGKSKKLKSVKELLGITIMERSSFEKDPIDFLEAKGYKEV | |
| | RKDLIIKLPKYSLFELENGRKRMLASAGELQKGNELALPSKYVNFLYLASHYEKLKGSPEDNEQKQLFVEQHKHYLDEIIEQISEFSKRVILADANLDKVLSAYNKHRDKPIREQAENI | |
| | IHLFTLTNLGAPAAFKYFDTTIDRKRYTSTKEVLDATLIHQSITGLYETRIDLSQLGGD | |
| 189 | MDKKYSIGLDIGTNSVGWAVITDDYKVPSKKLKVLGNTDRHGIKKNLIGALLFDSGETAEATRLKRTARRRYTRRKNRICYLQEIFSNEMAKVDDSFFHRLEESFLVEEDKKHERHPIF | WP_023080005.1 |
| | GNIVDEVAYHEKYPTIYHLRKKLADSTDKVDLRLIYLALAHMIKFRGHFLIEGDLNPDNSDVDKLFIQLVQTYNQLFEENPINASRVDAKAILSARLSKSRRLENLIAQLPGEKKNGLF | [Streptococcus |
| | GNLIALSLGLTPNFKSNFDLAEDAKLQLSKDTYDDDLDNLLAQIGDQYADLFLAAKNLSDAILLSDILRVNSEITKAPLSASMIKRYDEHHQDLTLLKALVRQQLPEKYKEIFFDQSKN | pyogenes] |
| | GYAGYIDGGASQEEFYKFIKPILEKMDGTEELLAKLNREDLLRKQRTFDNGSIPYQIHLGELHAILRRQEDFYPFLKDNREKIEKILTFRIPYYVGPLARGNSRFAWMTRKSEETITPW | |
| | NFEEVVDKGASAQSFIERMTNFDKNLPNEKVLPKHSLLYEYFTVYNELTKVKYVTEGMRKPAFLSGEQKKAIVDLLFKTNRKVTVKQLKEDYFKKIECFDSVEISGVEDRFNTSLGTYH | |
| | DLLKIIKDKDFLDNEENEDILEDIVLTLTLFEDKEMIEERLKKYANLFDDKVMKQLKRRHYTGWGRLSRKLINGIRDKQSGKTILDFLKSDGFANRNFMQLINDDSLTFKEAIQKAQVS | |
| | GQGHSLHEQIANLAGSPAIKKGILQTVKIVDELVKVMGHKPENIVIEMARENQTTQKGQKNSRERMKRIEEGIKELGSQILKEHPVENTQLQNEKLYLYYLQNGRDMYVDQELDINRLS | |
| | DYDVDHIVPQSFLKDDSIDNKVLTRSDKNRGKSDNVPSEEVVKKMKNYWRQLLNAKLITQRKFDNLTKAERGGLSELDKAGFIKRQLVETRQITKHVAQILDSRMNTKYDENDKLIREV | |
| | KVITLKSKLVSDFRKDFQFYKVREINNYHHAHDAYLNAVVGTALIKKYPKLESEFVYGDYKVYDVRKMIAKSEQEIGKATAKYFFYSNIMNFFKTEITLANGEIRKRPLIETNGETGEI | |
| | VWDKGRDFATVRKVLSMPQVNIVKKTEVQTGGFSKESILPKRNSDKLIARKKDWDPKKYGGFDSPTVAYSVLVVAKVEKGKSKKLKSVKELLGITIMERSSFEKNPIDFLEAKGYKEVR | |
| | KDLIIKLPKYSLFELENGRKRMLASAGELQKGNELALPSKYVNFLYLASHYEKLKGSPEDNEQKQLFVEQHKHYLDEIIEQISEFSKRVILADANLDKVLSAYNKHRDKPIREQAKNII | |
| | HLFTLTNLGAPAAFKYFDTTIERNRYKSIKEVLDATLIHQSITGLYETRIDLSQLGGD | |
| 190 | MDKKYSIGLDIGTNSVGWAVITDDYKVPSKKLKVLGNTDRHGIKKNLIGALLFDSGETAEATRLKRTARRRYTRRKNRICYLQEIFSNEMAKVDDSFFHRLEESFLVEEDKKHERHPIF | WP_023610282.1 |
| | GNIVDEVAYHEKYPTIYHLRKKLADSTDKVDLRLIYLALAHMIKFRGHFLIEGDLNPDNSDVDKLFIQLVQTYNQLFEENPINASRVDAKAILSARLSKSRRLENLIAQLPGEKKNGLF | [Streptococcus |
| | GNLIALSLGLTPNFKSNFDLAEDAKLQLSKDTYDDDLDNLLAQIGDQYADLFLAAKNLSDAILLSDILRVNSEITKAPLSASMIKRYDEHHQDLTLLKALVRQQLPEKYKEIFFDQSKN | pyogenes] |
| | GYAGYIDGGASQEEFYKFIKPILEKMDGTEELLAKLNREDLLRKQRTFDNGSIPYQIHLGELHAILRRQEDFYPFLKDNREKIEKILTFRIPYYVGPLARGNSRFAWMTRKSEETITPW | |
| | NFEEVVDKGASAQSFIERMTNFDKNLPNEKVLPKHSLLYEYFTVYNELTKVKYVTEGMRKPAFLSGEQKKAIVDLLFKTNRKVTVKQLKEDYFKKIECFDSVEISGVEDRFNTSLGTYH | |
| | DLLKIIKDKDFLDNEENEDILEDIVLTLTLFEDKEMIEERLKKYANLFDDKVMKQLKRRHYTGWGRLSRKLINGIRDKQSGKTILDFLKSDGFANRNFMQLINDDSLTFKEAIQKAQVS | |
| | GQGHSLHEQIANLAGSPAIKKGILQTVKIVDELVKVMGHKPENIVIEMARENQTTQKGQKNSRERMKRIEEGIKELGSQILKEHPVENTQLQNEKLYLYYLQNGRDMYVDQELDINRLS | |
| | DYDVDHIVPQSFLKDDSIDNKVLTRSDKNRGKSDNVPSEEVVKKMKNYWRQLLNAKLITQRKFDNLTKAERGGLSELDKAGFIKRQLVETRQITKHVAQILDSRMNTKYDENDKLIREV | |
| | KVITLKSKLVSDFRKDFQFYKVREINNYHHAHDAYLNAVVGTALIKKYPKLESEFVYGDYKVYDVRKMIAKSEQEIGKATAKYFFYSNIMNFFKTEITLANGEIRKRPLIETNGETGEI | |
| | VWDKGRDFATVRKVLSMPQVNIVKKTEVQTGGFSKESILPKRNSDKLIARKKDWDPKKYGGFDSPTVAYSVLVVAKVEKGKSKKLKSVKELLGITIMERSSFEKNPIDFLEAKGYKEVR | |
| | KDLIIKLPKYSLFELENGRKRMLASAGELQKGNELALPSKYVNFLYLASHYEKLKGSPEDNEQKQLFVEQHKHYLDEIIEQISEFSKRVILADANLDKVLSAYNKHRDKPIREQAKNII | |
| | HLFTLTNLGAPAAFKYFDTTIERNRYKSIKEVLDATLIHQSITGLYEIRIDLSQLGGD | |
| 191 | MDKKYSIGLDIGTNSVGWAVITDEYKVPSKKFKVLGNTDRHSIKKNLIGALLFDSGETAEATRLKRTARRRYTRRKNRICYLQEIFSNEMAKVDDSFFHRLEESFLVEEDKKHERHPIF | WP_010922251.1 |
| | GNIVDEVAYHEKYPTIYHLRKKLVDSTDKADLRLIYLALAHMIKFRGHFLIEGDLNPDNSDVDKLFIQLVQTYNQLFEENPINASGVDAKAILSARLSKSRRLENLIAQLPGEKKNGLF | [Streptococcus |
| | GNLIALSLGLTPNFKSNFDLAEDAKLQLSKDTYDDDLDNLLAQIGDQYADLFLAAKNLSDAILLSDILRVNTEITKAPLSASMIKRYDEHHQDLTLLKALVRQQLPEKYKEIFFDQSKN | pyogenes] |
| | GYAGYIDGGASQEEFYKFIKPILEKMDGTEELLVKLNREDLLRKQRTFDNGSIPHQIHLGELHAILRRQEDFYPFLKDNREKIEKILTFRIPYYVGPLARGNSRFAWMTRKSEETITPW | |
| | NFEEVVDKGASAQSFIERMTNFDKNLPNEKVLPKHSLLYEYFTVYNELTKVKYVTEGMRKPAFLSGEQKKAIVDLLFKTNRKVTVKQLKEDYFKKIECFDSVEISGVEDRFNASLGTYH | |
| | DLLKIIKDKDFLDNEENEDILEDIVLTLTLFEDREMIEERLKTYAHLFDDKVMKQLKRRRYTGWGRLSRKLINGIRDKQSGKTILDFLKSDGFANRNFMQLIHDDSLTFKEDIQKAQVS | |
| | GQGDSLHEHIANLAGSPAIKKGILQTVKVVDELVKVMGRHKPENIVIEMARENQTTQKGQKNSRERMKRIEEGIKELGSQILKEHPVENTQLQNEKLYLYYLQNGRDMYVDQELDINRL | |
| | SDYDVDHIVPQSFLKDDSIDNKVLTRSDKNRGKSDNVPSEEVVKKMKNYWRQLLNAKLITQRKFDNLTKAERGGLSELDKAGFIKRQLVETRQITKHVAQILDSRMNTKYDENDKLIRE | |
| | VKVITLKSKLVSDFRKDFQFYKVREINNYHHAHDAYLNAVVGTALIKKYPKLESEFVYGDYKVYDVRKMIAKSEQEIGKATAKYFFYSNIMNFFKTEITLANGEIRKRPLIETNGETGE | |
| | IVWDKGRDFATVRKVLSMPQVNIVKKTEVQTGGFSKESILPKRNSDKLIARKKDWDPKKYGGFDSPTVAYSVLVVAKVEKGKSKKLKSVKELLGITIMERSSFEKNPIDFLEAKGYKEV | |
| | KKDLIIKLPKYSLFELENGRKRMLASAGELQKGNELALPSKYVNFLYLASHYEKLKGSPEDNEQKQLFVEQHKHYLDEIIEQISEFSKRVILADANLDKVLSAYNKHRDKPIREQAENI | |
| | IHLFTLTNLGAPAAFKYFDTTIDRKRYTSTKEVLDATLIHQSITGLYETRIDLSQLGGD | |
| 192 | MDKKYSIGLDIGTNSVGWAVITDEYKVPSKKFKVLGNTDRHSIKKNLIGALLFDSGETAEATRLKRTARRRYTRRKNRICYLQEIFSNEMAKVDDSFFHRLEESFLVEEDKKHERHPIF | WP_010922251.1 |
| | GNIVDEVAYHEKYPTIYHLRKKLVDSTDKADLRLIYLALAHMIKFRGHFLIEGDLNPDNSDVDKLFIQLVQTYNQLFEENPINASGVDAKAILSARLSKSRRLENLIAQLPGEKKNGLF | [Streptococcus |
| | GNLIALSLGLTPNFKSNFDLAEDAKLQLSKDTYDDDLDNLLAQIGDQYADLFLAAKNLSDAILLSDILRVNTEITKAPLSASMIKRYDEHHQDLTLLKALVRQQLPEKYKEIFFDQSKN | pyogenes] |
| | GYAGYIDGGASQEEFYKFIKPILEKMDGTEELLVKLNREDLLRKQRTFDNGSIPHQIHLGELHAILRRQEDFYPFLKDNREKIEKILTFRIPYYVGPLARGNSRFAWMTRKSEETITPW | |
| | NFEEVVDKGASAQSFIERMTNFDKNLPNEKVLPKHSLLYEYFTVYNELTKVKYVTEGMRKPAFLSGEQKKAIVDLLFKTNRKVTVKQLKEDYFKKIECFDSVEISGVEDRFNASLGTYH | |
| | DLLKIIKDKDFLDNEENEDILEDIVLTLTLFEDREMIEERLKTYAHLFDDKVMKQLKRRRYTGWGRLSRKLINGIRDKQSGKTILDFLKSDGFANRNFMQLIHDDSLTFKEDIQKAQVS | |
| | GQGDSLHEHIANLAGSPAIKKGILQTVKVVDELVKVMGRHKPENIVIEMARENQTTQKGQKNSRERMKRIEEGIKELGSQILKEHPVENTQLQNEKLYLYYLQNGRDMYVDQELDINRL | |
| | SDYDVDHIVPQSFLKDDSIDNKVLTRSDKNRGKSDNVPSEEVVKKMKNYWRQLLNAKLITQRKFDNLTKAERGGLSELDKAGFIKRQLVETRQITKHVAQILDSRMNTKYDENDKLIRE | |
| | VKVITLKSKLVSDFRKDFQFYKVREINNYHHAHDAYLNAVVGTALIKKYPKLESEFVYGDYKVYDVRKMIAKSEQEIGKATAKYFFYSNIMNFFKTEITLANGEIRKRPLIETNGETGE | |
| | IVWDKGRDFATVRKVLSMPQVNIVKKTEVQTGGFSKESILPKRNSDKLIARKKDWDPKKYGGFDSPTVAYSVLVVAKVEKGKSKKLKSVKELLGITIMERSSFEKNPIDFLEAKGYKEV | |
| | KKDLIIKLPKYSLFELENGRKRMLASAGELQKGNELALPSKYVNFLYLASHYEKLKGSPEDNEQKQLFVEQHKHYLDEIIEQISEFSKRVILADANLDKVLSAYNKHRDKPIREQAENI | |
| | IHLFTLTNLGAPAAFKYFDTTIDRKRYTSTKEVLDATLIHQSITGLYETRIDLSQLGGD | |
| 193 | MDQKYSIGLDIGTNSVGWAVVTDDYKVPAKKMKVLGNTDKQSIKKNLLGALLFDSGETAEATRLKRTARRRYTRRRNRLRYLQEIFAEEMNKVDENFFQRLDDSFLVDEDKRGERHPIF | WP_003030002.1 |
| | GNIAAEVKYHDDFPTIYHLRKHLADISQKADLRLVYLALAHMIKFRGHFLIEGQLKAENTNVQALFKDFVEVYDKTVEESHLSEMTVDALSILTEKVSKSRRLENLIAHYPAEKKNTLF | MULTISPECIES: |
| | GNLIALSLGLQPNFKTNFQLSEDAKLQFSKDTYEEDLEGLLGEIGDEYADLFASAKNLYDAILLSGILTVDDNSTKAPLSASMVKRYEEHQKDLKKLKDFIKVNAPDQYNAIFKDKNKK | [Streptococcus] |
| | GYAGYIENGVKQDEFYKYLKGILLQINGSGDFLDKIDREDFLRKQRTFDNGSIPHQIHLQEMHAILRRQEEHYPFLKENQDKIEKILTFRIPYYVGPLARKGSRFAWAEYKADEKITPW | |
| | NFDDILDKEKSAEKFITRMTLNDLYLPEEKVLPKHSLLYETFTVYNELTKVKYVNEQGEAKFFDANMKQEIFDHVFKENRKVTKDKLLNYLNKEFEEFRIVNLTGLDKENKAFNSSLGT | |
| | YHDLRKILDKSFLDDKANEKTIEDIIQTLTLFEDREMIRQRLQKYSDIFTKAQLKKLERRHYTGWGRLSYKLINGIRNKENKKTILDYLIDDGYANRNFMQLINDDALSFKEEIARAQI | |
| | IGDVDDIANVVHDLPGSPAIKKGILQSVKIVDELVKVMGHNPANIIIEMARENQMTDKGRRNSQQRLKLLQDSLKNLDNPVNIKNVENQQLQNDRLFLYYIQNGKDMYTGETLDINNLS | |
| | QYDIDHIIPQAFIKDNSLDNRVLTRSDKNRGKSDDVPSIEVVHEMKSFWSKLLSVKLITQRKFDNLTKAERGGLTEEDKAGFIKRQLVETRQITKHVAQILDERFNTEFDGNKRRIRNV | |
| | KIITLKSNLVSNFRKEFELYKVREINDYHHAHDAYLNAVVGNALLLKYPQLEPEFVYGEYPKYNSYRSRKSATEKFLFYSNILRFFKKEDIQTNEDGEIAWNKEKHIKILRKVLSYPQV | |
| | NIVKKTEEQTGGFSKESILPKGESDKLIPRKTKNSYWNPKKYGGFDSPVVAYSILVFADVEKGKSKKLRKVQDMVGITIMEKKRFEKHPVDFLEQRGYRNVRLEKIIKLPKYSLFELEN | |
| | KRRRLLASARELQKGNELVIPQRFTTLLYHSYQIEKNYEPEHREYVEKHKDEFKELLEYISVFSRKYVLADNNLTKIEMLFSKNKDAEVSSLAKSFISLLTFTAFGAPAAFNFFGENID | |
| | RKRYTSVTECLNATLIHQSITGLYETRIDLSKLGED | |
| 194 | MEKEYTIGLDIGTNSVGWAVLTDDYRLVARKMSIQGDSNRKKIKKNFWGARLFEEGKTAQFRRIKRTNRRRIARRRQRVLALQDIFAEEIHKKDPNFFARLEEGDRVEADKRFAKFPVF | WP_023519017.1 |
| | ATLSEEKNYHRQYPTIYHLRHDLANSKEQADIRLVYLAIAHCLKYRGHFLFEGELDTENTSVTENYQQFLQAYQQFFPEPIGDLDDAVPILTERLSKAKRVEKVLAYYPSEKSTGNFAQ | [Enterococcus |
| | FLKLMVGNQANFKKTFDLEEEMKLNFTRDCYEEDLNELLEKTSDDYAELFLKAKGVYDAILLSQILSKSDDETKAKLSANMKLRFEEHQRDLKQLKELVRRDLPKKYDDFFKNRSKNGY | mundtii] |
| | AGYVKGKATQEDFYKFLRTELAGLEESQSIMEKIDLEIYLLKQRTFANGVIPHQIHLVEMREIMDRQKRFYPFLKGAQGKIEKLLTFRIPYYVGPLAQEGQSPFAWIKRKSPSQITPWN | |
| | FAEVVDKENSAIEFIERMTNQDTYLPKEKVLPKQSLIYQRFMIFNELTKVSYTDERGKSHYFSSEQKRKIFNELFKQHPRVTEKQLRKFLELNEQIDSTEIKGIETSFNASYSTYHDLL | |
| | KLSDQMDTLLDDPDMTTMFEEIIKILTIFEDREMIREQLKPYETVLGLPAIKKLAKKHYTGWGRLSEKMIQGMREKQSRKTILDYLIDDDDFPCNRNRNFMQLINDDHLSFKETIANEL | |
| | IMSDSNVLLDQVKAIPGSPAVKKGIWQSIKIVEEIIGIIGKAPKNIVIEMARENQRTSRSRPRLKALEEALKNIDSPLLKDYPTDNQALQKDRLYLYYLQNGKDMYTGEPLEIHRLSEY | |
| | DIDHIIPRSFIVDNSLDNKVLVSSKVNRGKLDNAPDPLVVKRMRSHWEKLHQAKLISDKKLANLTKQNLTEADKARFIQRQLVETRQITKHVANLLHQHFNLPEEVSATEKTSIITLKS | |
| | TLTSQFRQMFDIYKVREINHHHHAHDAYLNGVVAMTLLKKYPKLAPEFVYGSYIKGDINQINKATAKKEFYSNIMKFFESEEIICDEQGEVIWNKKRDLSTIKKTIGAHQVNIVKKVEK | |
| | QKGGFYKETINSKANPEKLIPRKASLDPLKYGGYGSPLVAYTVIFIFEKGKQKKVTKGIEGITVMEQLRFEQDPREFLKTKGYEGVKQWLILPKYILFEAQGGYRRMIASHQETQKANS | |
| | LILPENLVTLLYHARHYDEINHKVSFDYVNAHKEGFNDIFDFISDFGVRYILAPQHLEKIKVAYEKNKEVDLKEMIDAILSLLKFTLFGASVEFKFFDIKILKRYKSLTDIWEATIIYQ | |
| | SVTGLYERRVEVRKLWDGERL | |
| 195 | MEKKYSIGLDIGTNSVGWAVITDDYKVPSKKFKVLGNTNRKSIKKNLMGALLFDSGETAEATRLKRTARRRYTRRKNRIRYLQEIFANEMAKLDDSFFQRLEESFLVEEDKKNERHPIF | WP_003043819.1 |
| | GNLADEVAYHRNYPTIYHLRKKLADSPEKADLRLIYLALAHIIKFRGHFLIEGKLNAENSDVAKLFYQLIQTYNQLFEESPLDEIEVDAKGILSARLSKSKRLEKLIAVFPNEKKNGLF | [Streptococcus |
| | GNIIALALGLTPNFKSNFDLTEDAKLQLSKDTYDDDLDELLGQIGDQYADLFSAAKNLSDAILLSDILRSNSEVTKAPLSASMVKRYDEHHQDLALLKTLVRQQFPEKYAEIFKDDTKN | canis] |
| | GYAGYVGIGIKHRKRTTKLATQEEFYKFIKPILEKMDGAEELLAKLNRDDLLRKQRTFDNGSIPHQIHLKELHAILRRQEEFYPFLKENREKIEKILTFRIPYYVGPLARGNSRFAWLT | |
| | RKSEEAITPWNFEEVVDKGASAQSFIERMTNFDEQLPNKKVLPKHSLLYEYFTVYNELTKVKYVTERMRKPEFLSGEQKKAIVDLLFKTNRKVTVKQLKEDYFKKIECFDSVEIIGVED | |
| | RFNASLGTYHDLLKIIKDKDFLDNEENEDILEDIVLTLTLFEDREMIEERLKTYAHLFDDKVMKQLKRRHYTGWGRLSRKMINGIRDKQSGKTILDFLKSDGFSNRNFMQLIHDDSLTF | |
| | KEEIEKAQVSGQGDSLHEQIADLAGSPAIKKGILQTVKIVDELVKVMGHKPENIVIEMARENQTTTKGLQQSRERKKRIEEGIKELESQILKENPVENTQLQNEKLYLYYLQNGRDMYV | |
| | DQELDINRLSDYDVDHIVPQSFIKDDSIDNKVLTRSVENRGKSDNVPSEEVVKKMKNYWRQLLNAKLITQRKFDNLTKAERGGLSEADKAGFIKRQLVETRQITKHVARILDSRMNTKR | |
| | DKNDKPIREVKVITLKSKLVSDFRKDFQLYKVRDINNYHHAHDAYLNAVVGTALIKKYPKLESEFVYGDYKVYDVRKMIAKSEQEIGKATAKRFFYSNIMNFFKTEVKLANGEIRKRPL | |
| | IETNGETGEVVWNKEKDFATVRKVLAMPQVNIVKKTEVQTGGFSKESILSKRESAKLIPRKKGWDTRKYGGFGSPTVAYSILVVAKVEKGKAKKLKSVKVLVGITIMEKGSYEKDPIGF | |
| | LEAKGYKDIKKELIFKLPKYSLFELENGRRRMLASATELQKANELVLPQHLVRLLYYTQNISATTGSNNLGYIEQHREEFKEIFEKIIDFSEKYILKNKVNSNLKSSFDEQFAVSDSIL | |
| | LSNSFVSLLKYTSFGASGGFTFLDLDVKQGRLRYQTVTEVLDATLIYQSITGLYETRTDLSQLGGD | |
| 196 | MEKSYSIGLDIGTNSVGWAVITDDYKVPAKKMKVLGNTDKKYIKKNLLGALLFDSGETAEVTRLKRTARRRYTRRKNRLRYLQEIFAKEMTKVDESFFQRLEESFLTDDDKTFDSHPIF | WP_014334983.1 |
| | GNKAEEDAYHQKFPTIYHLRKYLADSQEKADLRLVYLALAHMIKYRGHFLIEGELNAENTDVQKLFNVFVETYDKIVDESHLSEIEVDASSILTEKVSKSRRLENLIKQYPTEKKNTLF | [Streptococcus |
| | GNLIALALGLQPNFKTNFKLSEDAKLQFSKDTYEEDLEELLGKVGDDYADLFISAKNLYDAILLSGILTVDDNSTKAPLSASMIKRYVEHHEDLEKLKEFIKINKLKLYHDIFKDKTKN | infantarius] |
| | GYAGYIDNGVKQDEFYKYLKTILTKIDDSDYFLDKIERDDFLRKQRTFDNGSIPHQIHLQEMHSILRRQGDYYPFLKENQAKIEKILTFRIPYYVGPLARKDSRFAWANYHSDEPITPW | |
| | NFDEVVDKEKSAEKFITRMTLNDLYLPEEKVLPKHSHVYETFTVYNELTKIKYVNEQGESFFFDANMKQEIFDHVFKENRKVTKAKLLSYLNNEFEEFRINDLIGLDKDSKSFNASLGT | |
| | YHDLKKILDKSFLDDKTNGQIIEDIVLTLTLFEDRDMIHERLQKYSDFFTSQQLKKLERRHYTGWGRLSYKLINGIRNKENNKTILDFLIDDGHANRNFMQLINDESLSFKTIIQEAQV | |
| | VGDVDDIEAVVHDLPGSPAIKKGILQSVKIVDELVKVMGDNPDNIVIEMARENQTTGYGRNKSNQRLKRLQDSLKEFGSDILSKKKPSYVDSKVENSHLQNDRLFLYYIQNGKDMYTGE | |
| | ELDIDRLSDYDIDHIIPQAFIKDNSIDNKVLTSSAKNRGKSDDVPSIEIVRNRRSYWYKLYKSGLISKRKFDNLTKAERGGLTEADKAGFIKRQLVETRQITKHVAQILDARFNTKRDE | |
| | NDKVIRDVKVITLKSNLVSQFRKEFKFYKVREINDYHHAHDAYLNAVVGTALLKKYPKLTPEFVYGEYKKYDVRKLIAKSSDDYSEMGKATAKYFFYSNLMNFFKTEVKYADGRVFERP | |
| | DIETNADGEVVWNKQKDFDIVRKVLSYPQVNIVKKVEAQTGGFSKESILSKGDSDKLIPRKTKKVYWNTKKYGGFDSPTVAYSVLVVADIEKGKAKKLKTVKELVGISIMERSFFEENP | |
| | VSFLEKKGYHNVQEDKLIKLPKYSLFEFEGGRRRLLASATELQKGNEVMLPAHLVELLYHAHRIDSFNSTEHLKYVSEHKKEFEKVLSCVENFSNLYVDVEKNLSKVRAAAESMTNFSL | |
| | EEISASFINLLTLTALGAPADFNFLGEKIPRKRYTSTKECLSATLIHQSVTGLYETRIDLSKLGEE | |
| 197 | MEKTYSIGLDIGTNSVGWAVITDDYKVPAKKMKVLGNTDKKYIKKNLLGALLFDSGETAEATRLKRAARRRYTRRKNRLRYLQEIFAKEMAKVDESFFQRLEESFLTDDDKTFDSHPIF | WP_004232481.1 |
| | GNKAEEDTYHQEFPTIYHLRKHLADSPEKVDLRLVYLALAHMIKFRGHFLIEGQLNAENTDVQKIFADFVGVYDRTFDDSHLSEITVDAASILTEKISKSRRLENLIKQYPTEKKNTLF | [Streptococcus |
| | GNLVALALGLQPNFKTNFKLSEDAKLQFSKDTYDEDLEELLGKIGDDYADLFTAAKNLYDAILLSGILTVDDNSTKAPLSASMIKRYEEHHEDLEKLKTFIKVNNFDKYHEIFKDKSKN | equinus] |
| | GYAGYIENGVKQDIFYKHLKSIISEKNGGQYFLDKIEREDFLRKQRTFDNGSIPYQIHLQEMRTILRRQGEYYPFLKENQAKIEKILTFRIPYYVGPLARKNSRFAWAKYHSDEPITPW | |
| | NFDEVVDKEKSAEKFITRMTLNDLYLPEEKVLPKHSYVYETFAVYNELTKIKYVNEQGKSFFFDANMKQEIFDHVFKENRKVTKAKLLSYLNNEFEEFRINDLIGLDKDSKSFNASLGT | |
| | YHDLKKILDKSFLDDKTNEQIIEDIVLTLTLFEDRDMIHERLQKYSDIFTSQQLKKLERRHYTGWGRLSYKLINGIRNKENNKTILDFLIDDGDANRNFMQLINDDSLSFKTTIQEAQV | |
| | VGDVDDIEAVVHDLPGSPAIKKGILQSVKIVDELVKVMGHNPQNIVIEMARENQITGYGRNRSNQRLKRLQDSLKEFGSDILSKKKPSYVDSKVENSHLQNDRLFLYYIQNGKDMYTGE | |
| | ELDIDHLSDYDIDHIIPQAFIKDNSIDNRVLTSSAKNRGKSDDVPSIEIVRNRKSYWYKLYKSGLISKRKFDNLTKAERGGLTETDKAGFIKRQLVETRQITKHVAQILDARFNTKCDE | |
| | NDKVIRDVKVITLKSSLVSQFRKEFKFYKVREINDYHHAHDAYLNAVVGTALLKKYPKLAPEFVYGEYKKYDVRKLVAKSSDNHSELGKATAKYFFYSNLMNFFKTEVKYADGRVFERP | |
| | DIETNADGEVVWNKQRDFNIVRKVLSYPQVNIVKKVEVQTGGFSKESILPKGDSDKLIPRKTKKLQWETQKYGGFDSPTVAYSVLVVADVEKGKTRKLKTVKELVGISIMERSSFEENP | |
| | VSFLEKKGYHNVQEDKLIKLPKYSLFEFEGGRRRLLASATELQKGNEVVLPQYMVNLLYHSQHVNNSHKPEHLNYVKQHKDEFKDIFNLIISIARINILKPKVVDNLINEFTEYGQEDI | |
| | SSLSESFINLLKFISFGAPGAFKFLKLDVKQSNLRYKSTTEALSATLIHQSVTGLYETRIDLSKLGEE | |
| 198 | MENKNYSIGLDIGTNSVGWAVITDDYKVPSKKMKVLGNTDKRFIKKNLIGALLFDEGTTAEARRLKRTARRRYTRRKNRLRYLQEIFAEEMSKVDSSFFHRLDDSFLIPEDKKGSKYPI | WP_000428612.1 |
| | FATLIEEKEYHKQFPTIYHLRKQLADSKEKTDLRLIYLALAHMIKYRGHFLYEDTFDIKNNDIQKIFNEFISIYNNTFEGNSLSGQNVQVEAIFTDKISKSAKRERVLKLFPDEKSTGL | [Streptococcus |
| | FSEFLKLIVGNQADFKKHFDLEEKAPLQFSRDTYDEDLENLLGQIGDDFADLFVAAKKLYDAILLSGILTVTDPSTKAPLSASMIERYENHQKDLATLKQFIKTNLPEKYDEVFSDQSK | oralis] |
| | DGYAGYIDGKTTQESFYKYIKNLLSKFEGADYFLEKIEREDFLRKQRTFDNGSIPHQIHLQEMNAILRRQGEHYPFLKENKEKIEKILTFRIPYYVGPLARGNRDFAWLTRNSDQAIRP | |
| | WNFEEIVDKASSAESFINKMTNYDLYLPEEKVLPKHSLLYETFAVYNELTKVKFIAEGLRDYQFLDSRQKKDIFYTLFKAEDKRKVTEKDIIQYLHTVDGYDGIELKGIEKQFNASLST | |
| | YHDLLKIIKDKEFMDDPNNEEILENIVHTLTIFEDREMIKQRLAQYDSLFDEKVIKALTRRHYTGWGKLSSKLINGIRDKQTGKTILDYLMDDGYNNRNFMQLINDDELSFKEIIKKAQ | |
| | VVGKTDDVKQVVQELPGSPAIKKGILQSIKLVDELVKVMGHEPESIVIEMARENQTTARGKKNSQQRYKRIEDSLKILASGLNAKILKEHPTDNIQLQNDRLFLYYLQNGRDMYTGKPL | |
| | DINQLSSYDIDHIVPQAFIKDDSLDNRVLTSLKDNRGKSDNVPSLEVVEKMKTFWQQLLDSKLISYRKFNNLTKAERGGLDERDKVGFIKRQLVETRQITKHVAQILDARYNTEVNEKD | |
| | KKNRTVKIITLKSNLVSNFRKEFRLYKIREINDYHHAHDAYLNAVVAKAILKKYPKLEPEFVYGDYQKYDLKRYISRSKDPKEIEKATEKYFFYSNLLNFFKEEVHYADGTIVKRENIE | |
| | YSKDTGEIAWNKEKDFATIKKVLSLPQVNIVKKREVQTGGFSKESILPKGNSDKLIPRKTKDILWDTTKYGGFDSPVIAYSILLIADIEKGKAKRLKTVKTLVGITIMEKATFEKSPIA | |
| | FLENKGYHNVRKENILCLPKYSLFELKNGRRRMLASAKELQKGNEIVLPVHLTTLLYHAKNIHRLDEPEHLEYIQKHRNEFKGLLNLVSEFSQKYVLADANLEKIKNLYADNEQADIEI | |
| | LANSFINLLTFTALGAPAAFKFFGKDVDRKRYTTVSEILNATLIHQSITGLYETRIDLSKLGED | |
| 199 | MENKNYSIGLDIGTNSVGWSVITDDYKVPSKKMKVLGNTDKHFIKKNLIGALLFDEGTTAEARRLKRTARRRYTRRKNRLRYLQEIFSEEIGKVDSSFFHRLDDSFLIPEDKRGSKYPI | WP_009729476.1 |
| | FATLAEEKKYHKQFPTIYHLRKQLADSKEKTDLRLIYLALAHMIKYRGHFLYEEAFDIKNNDIQKIFNEFISIYNNTFEGNSLSGQNVQVEAIFTDKISKSAKRERVLKLFPDEKSTGL | [Streptococcus |
| | FSEFLKLIVGNQADFKKHFDLEEKAPLQFSRDTYDEDLENLLGQIGDDFADLFLVAKKLYDAILLSGILTVTNPSTKAPLSASMIERYENHQKDLASLKQFIKNNLPEKYDEVFSDQSE | sp. F0441] |
| | DGYAGYIDGKTTQETFYKYIKNLLSKFEGADYFLDKIEREDFLRKQRTFDNGSIPHQIHLQEMNAILRRQGEHYPFLKENKEKIEKILTFRIPYYVGPLARGNRDFAWLTRNSDQAIRP | |
| | WNFEEIVDKASSAEDFINKMTNYDLYLPEEKVLPKHSLLYETFAVYNELTKVKFIAEGLRDYQFLDSGQKKQIVTQLFKEKRKVTEKDITQFLHNVDGYDGIELKGIEKQFNASLSTYH | |
| | DLLKIIKDKAFMDDAKNEAILENIVHTLTIFEDREMIKQRLAQYDSLFDEKVIKALTRRHYTGWGKLSAKLINGISDKQTGNTILDYLIDDGEINRNFMQLINDDGLSFKEIIQKAQVV | |
| | GKTNDVKQVVQELPGSPAIKKGILQSIKIVDELVKVMGHAPESIVIEMARENQTTARGKKNSQQRYKRIEDSLKILASGLNSKILKEHPTDNIQLQNDRLFLYYLQNGKDMYTGEALDI | |
| | NQLSSCDIDHIIPQAFIKDDSLDNRVLTSSKDNRGKSDNVPSLEVVDKMKVFWQQLLDSKLISYRKFNNLTKAERGGLNELDKVGFIKRQLVETRQITKHVAQILDARFNKEVTEKDKK | |
| | NRTVKIITLKSNLVSNFRKEFELYKVREINDYHHAHDAYLNAVVAKAILKKYPKLEPEFVYGDYQKYDLKRYISRSKDPKEIEKATEKYFFYSNLLNFFKEEVHYADGTIVKRENIEYS | |
| | KDTGEIAWNKEKDFATIKKVLSLPQVNIVKKREVQTGGFSKESILPKGNSDKLIPRKTKDILWDTTKYGGFDSPVIAYSILLIADIEKGKAKKLKTVKTLVGITIMEKDAFEKNPIAFL | |
| | ENKGYHNVCKENILCLPKYSLFELENGRRRLLASAKELQKCNEIVLPVYLTTLLYHSKNVHKLDEPGHLEYIQKHRNEFKDLLNLVSEFSQKYVLADANLEKIKNLYADNEQADIEILA | |
| | NSFINLLTFTALGAPAAFKFFGKDVDRKRYTTVSEILNATLIHQSITGLYETRIDLSKLGED | |
| 200 | MENKNYSIGLDIGTNSVGWSVITDDYKVPSKKMKVLGNTDKRFIKKNLIGALLFDEGTTAEARRLKRTARRRYTRRKNRLRYLQEIFAEEMSKVDSSFFHRLDDSFLIPEDKRGSKYPI | WP_000428613.1 |
| | FATLAEEKEYHKQFPTIYHLRKQLADSKEKTDLRLIYLALAHMIKYRGHFLYEDTFDIKNNDIQKIFSEFISIYDNTFEGSSLSGQNAQVEAIFTDKISKSAKRERVLKLFPDEKSTGL | [Streptococcus |
| | FSEFLKLIVGNQADFKKHFDLGEKAPLQFSKDTYDEDLENLLGQIGDDFADLFLVAKKLYDAILLSGILTVTDPSTKAPLSASMIERYENHQKDLAVLKQFIKNNLPEKYDEVFSDQSK | oralis] |
| | DGYAGYIDGKTTQEAFYKYIKNLLSKFEGTDYFLEKIEREDFLRKQRTFDNGSIPHQIHLQEMNAILRRQGEHYPFLKDNKEKIEKILTFRIPYYVGPLARGNRDFAWLTRNSDEAIRP | |
| | WNFEEIVDKASSAEDFINKMTNYDLYLPEEKVLPKHSLLYETFAVYNELTKVKFIAEGLRDYQFLDSGQKKQIVTQLFKEKRKVTEKDITQFLHNVDGYDGIELKGIEKQFNASLSTYH | |
| | DLLKIIKDKEFMDDSKNEEILENIVHTLTIFEDREMIKQRLAQYDSLFDEKVIKALIRRHYTGWGKLSAKLIDGICDKQTGNTILDYLIDDGKNNRNFMQLINDDGLSFKEITQKAQVV | |
| | GKTDDVKQVVQELPGSPAIKKGILQSIKIVDELVKVMGHTPESIVIEMARENQTTARGKKNSQQRYKRIEDALKNLASGLDSNILKEHPTNNIQLQNDRLFLYYLQNGRDMYTGKPLDI | |
| | NQLSSYDIDHIVPQAFIKDDSLDNRVLTSLKDNRGKSDNVPSIEVVQKRKAFWQQLLDSKLISERKFNNLTKAERGGLDERDKVGFIKRQLVETRQITKHVAQILDARFNKEVNEKDKK | |
| | NRTVKIITLKSNLVSNFRKEFRLYKVREINDYHHAHDAYLNAVVAKAILKKYPKLEPEFVYGDYQKYDLKRYISRSRNPKEVEKATEKYFFYSNLLNFFKEEVHYADGTIVKRENIEYS | |
| | KDTGEIAWNKEKDFATIKKVLSYPQVNIVKKREVQTGGFSKESILPKGNSDKLIPRKTKDILWETTKYGGFDSPVIAYSILLIADIEKGKAKKLKTVKTLVGITIMEKAAFEENPITFL | |
| | ENKGYHNVRKENILCLPKYSLFELENGRRRLLASAKELQKGNEIVLPVYLTTLLYHSKNVHKLDEPEHLEYIQKHRNEFKDLLNLVSEFSQKYVLADANLEKIQNLYADNEQADIEILA | |
| | NSFINLLTFTALGAPAAFKFFGKDIDRKRYTTVSEILNATLIHQSITGLYETRIDLSKLGED | |
| 201 | MGKEYTIGLDIGTNSVGWAVLQEDLDLVRRKMKVYGNTEKNYLKKNFWGVDLFDEGMTAKDTRLKRTTRRRYFRRRQRISYLQTFFQEEMNRIDPNFFNRLDESFLIEEDKLSERHPIF | WP_048604708.1 |
| | GTIEEEVAYHKNYATIYHLRKELADAEEKADLRLVYLALAHIIKYRGHFLIEGRLSTENTSTEETFKTFLQKYNQTFNPVDETISIGSIFADKVSRAKKAEGVLALFPDEKRNGTFDQF | [Enterococcus sp. |
| | LKMIVGNQGNFKKTFELEEDAKLQFSKEEYDESLEALLGEIGDEYADVFEAAKNVYNAVELSGILTVTDNSTKAKLSASMIKRYEDHKTDLKLFKEFIRKNLPEKYHEIFNDKNTDGYA | AM1] |
| | GYIDNSKKTSQEKFYKYITNLIEKIDGAEYFLKKIENEDFLRKQRTFDNGIIPHQIHLEELKAILHHQAMYYPFLQEKFSNFVDLLTFRIPYYVGPLANGNSRFSWLSRKSDEPIRPWN | |
| | LAEVVDLSKSAELFIERMTNFDLYLPSEKVLPKHSMLYEKYTVYNELTKVTYKDEQGKVQNFSSEEKERIFIDLFKQHRKVTKKDLSNFLRNEYNLDDVIIDGIENKFNASFNTYHDFL | |
| | KLKIDPKVLDDPANEPMFEEIVKILTIFEDRKMLREQLSKFSDRLSEKTIKDLERRHYTGWGRLSAKLINGIHDKQSNKTILDYLINDDAPKKNINRNFMQLINDNRLTFKEEIEKEQL | |
| | KANSEESLIEIVQNLAGSPAIKKGIFQSLKIVDELVEIMGYAPTNIVVEMARENQTTANGRRNSRPRLKNLEKAIDDLDSEILKKHPVDNKALQKDRLYLYYLQNGKDMYTNEELDIHK | |
| | LSTYDIDHIIPQSFIVDNSLDNRVLVSSSKNRGKLDDVPSKEVVKKMRAFWESLYRSGLISKKKFDNLVKAESGGLSEDDKAGFIHRQLVETRQITKNVARILHQRFNSEKDEEGNLIR | |
| | KVRIITLKSALTSQFRKNYGIYKIREINDYHHAHDAYLNGVVATALLKIYPQLEPEFVYGEFHRFNAFKENKATAKKQFYSNLMEFSKSDKVIIDENGEILWNQKKIVTVKKVMNYRQM | |
| | NIVKKVEIQKGGFSKESILPKGDSDKLISRKKEWDTTKYGGFDSPNVAYSVVIRYEKGKTRKLVKTIVGITIMERAAFEKNEREFLKNKGYQNPQICMKLPKYSLYEFDDGRRRLLASA | |
| | KEAQKGNQMVLPAHLVTFLYHAKHCNEKPDSLKYVTEHQSGFSEIMAHVKDFAEKYTLVDKNLEKILSLYAKNMDSEVKEIAQSFVDLMQLNAFGAPADFKFFGETIPRKRYTSVNELL | |
| | EATIINQSITGLYETRRRLGD | |
| 202 | MGKPYSIGLDIGTNSVGWAVVTDDYKVPAKKMKVLGNTDKQSIKKNLLGALLFDSGETAEATRLKRTARRRYTRRKNRLRYLQEIFTGEMNKVDENFFQRLDDSFLVDEDKRGEHHPIF | WP_006269658.1 |
| | GNIAAEVKYHDDFPTIYHLRRHLADTSKKADLRLVYLALAHMIKFRGHFLYEGDLKAENTDVQALFKDFVEEYDKTIEESHLSEITVDALSILTEKVSKSSRLENLIAHYPTEKKNTLF | [Streptococcus |
| | GNLIALSLDLHPNFKTNFQLSEDAKLQFSKDTYEEDLEGFLGEVGDEYADLFASAKNLYDAILLSGILTVDDNSTKAPLSASMVKRYEEHQKDLKKLKDFIKVNAPDQYNAIFKDKNKK | constellatus] |
| | GYASYIESGVKQDEFYKYLKGILLKINGSGDFLDKIDREDFLRKQRTFDNGSIPHQIHLQEMHAILRRQGEHYPFLKENQDKIEKILTFRIPYYVGPLARKGSRFAWAEYKADEKITPW | |
| | NFDDILDKEKSAEKFITRMTLNDLYLPEEKVLPKHSPLYEAFTVYNELTKVKYVNEQGEAKFFDTNMKQEIFDHVFKENRKVTKDKLLNYLNKEFEEFRIVNLTGLDKENKAFNSSLGT | |
| | YHDLRKILDKSFLDDKANEKTIEDIIQTLTLFEDREMIRQRLQKYSDIFTKAQLKKLERRHYTGWGRLSYKLINGIRNKENKKTILDYLIDDGYANRNFMQLINDDALSFKEEIARAQI | |
| | IDDVDDIANVVHDLPGSPAIKKGILQSVKIVDELVKVMGHNPANIIIEMARENQTTDKGRRNSQQRLKLLQDSLKNLDNPVNIKNVENQQLQNDRLFLYYIQNGKDMYTGETLDINNLS | |
| | QYDIDHIIPQAFIKDNSLDNRVLTRSDKNRGKSDDVPSIEVVHEMKSFWSKLLSVKLITQRKFDNLTKAERGGLTEEDKAGFIKRQLVETRQITKHVAQILDERFNTEFDGNKRRIRNV | |
| | KIITLKSNLVSNFRKEFELYKVREINDYHHAHDAYLNAVVGNALLLKYPQLEPEFVYGEYPKYNSYRSRKSATEKFLFYSNILRFFKKEDIQTNEDGEIAWNKEKHIKILRKVLSYPQV | |
| | NIVKKTEEQTGGFSKESILPKGESDKLIPRKTKNSYWDPKKYGGFDSPVVAYSILVFADVEKGKSKKLRKVQDMVGITIMEKKRFEKNPVDFLEQRGYRNVRLEKIIKLPKYSLFELEN | |
| | KRRRLLASAKELQKGNELVIPQRFTTLLYHSYRIEKDYEPEHREYVEKHKDEFKELLEYISVFSRKYVLADNNLTKIEMLFSKNKDAEVSSLAKSFISLLTFTAFGAPAAFNFFGENID | |
| | RKRYTSVTECLNATLIHQSITGLYETRIDLSKLGED | |
| 203 | MKKDYVIGLDIGSNSVGWAVMTEDYQLVKKKMPIYGNTEKKKIKKNFWGVRLFEEGHTAEDRRLKRTARRRISRRRNRLRYLQAFFEEAMTDLDENFFARLQESFLVPEDKKWHRHPIF | WP_010824395.1 |
| | AKLEDEVAYHETYPTIYHLRKKLADSSEQADLRLIYLALAHIVKYRGHFLIEGKLSTENTSVKDQFQQFMVIYNQTFVNGESRLVSAPLPESVLIEEELTEKASRTKKSEKVLQQFPQE | [Enterococcus |
| | KANGLFGQFLKLMVGNKADFKKVFGLEEEAKITYASESYEEDLEGILAKVGDEYSDVFLAAKNVYDAVELSTILADSDKKSHAKLSSSMIVRFTEHQEDLKNFKRFIRENCPDEYDNLF | faecalis] |
| | KNEQKDGYAGYITHAGKVSQLKFYQYVKKIIQDIAGAEYFLEKIAQENFLRKQRTFDNGVIPHQIHLAELQAIIHRQAAYYPFLKENQEKIEQLVTFRIPYYVGPLSKGDASTFAWLKR | |
| | QSEEPIRPWNLQETVDLDQSATAFIERMTNFDTYLPSEKVLPKHSLLYEKFMVFNELTKISYTDDRGIKANFSGKEKEKIFDYLFKTRRKVKKKDITQFYRNEYNTEIVTLSGLEEDQF | |
| | NASFSTYQDLLKCGLTRAELDHPDNAEKLEDIIKILTIFEDRQRIRTQLSTFKGQFSAEVLKKLERKHYTGWGRLSKKLINGIYDKESGKTILDYLIKDDGVSKHYNRNFMQLINDSQL | |
| | SFKNAIQKAQSSEHEETLSETVNELAGSPAIKKGIYQSLKIVDELVAIMGYAPKRIVVEMARENQTTSTGKRRSIQRLKIVEKAMAEIGSNLLKEQPTTNEQLRDTRLFLYYMQNGKDM | |
| | YTGDELSLHRLSHYDIDHIIPQSFMKDDSLDNLVLVGSTENRGKSDDVPSKEVVKDMKAYWEKLYAAGLISQRKFQRLTKGEQGGLTLEDKAHFIQRQLVETRQITKNVAGILDQLYNA | |
| | KSKEKKVQIITLKASLTSQFRSIFGLYKVREVNDYHHGQDAYLNCVVATTLLKVYPNLAPEFVYGEYPKFQTFKENKATAKTITYTNLMRFFTEDEPRFTKDGEILWSNSYLKTIKKEL | |
| | NYHQMNIVKKVEVQKGGFSKESIKPKGPSNKLIPVKNGLDPQKYGGFDSPVVAYTVLFTHEKGKKPLIKQEILGITIMEKTRFEQNPILFLEEKGFLRPRVLMKLPKYTLYEFPEGRRR | |
| | LLASAKEAQKGNQMVLPEHLLTLLYHAKQCLLPNQSESLAYVEQHQPEFQEILERVVDFAEVHTLAKSKVQQIVKLFEANQTADVKEIAASFIQLMQFNAMGAPSTFKFFQKDIERARY | |
| | TSIKEIFDATIIYQSTTGLYETRRKVVD | |
| 204 | MKKDYVIGLDIGTNSVGWAVMTEDYQLVKKKMPIYGNTEKKKIKKNFWGVRLFEEGHTAEDRRLKRTARRRISRRRNRLRYLQAFFEEAMTALDENFFARLQESFLVPEDKKWHRHPIF | WP_033624816.1 |
| | AKLEDEVAYHETYPTIYHLRKKLADSSEQADLRLIYLALAHIVKYRGHFLIEGKLSTENISVKDQFQQFMVIYNQTFVNGESRLVSAPLPESVLIEEELTEKASRTKKSEKVLQQFPQE | [Enterococcus |
| | KANGLFGQFLKLMVGNKADFKKVFGLEEEAKITYASESYEEDLEGILAKVGDEYSDVFLAAKNVYDAVELSTILADSDKKSHAKLSSSMIVRFTEHQEDLKNFKRFIRENCPDEYDNLF | faecalis] |
| | KNEQKDGYAGYIAHAGKVSQLKFYQYVKKIIQDIAGAEYFLEKIAQENFLRKQRTFDNGVIPHQIHLAELQAIIHRQAAYYPFLKENQKKIEQLVTFRIPYYVGPLSKGDASTFAWLKR | |
| | QSEEPIRPWNLQETVDLDQSATAFIERMTNFDTYLPSEKVLPKHSLLYEKFMVFNELTKISYTDDRGIKANFSGKEKEKIFDYLFKTRRKVKKKDITQFYRNEYNTEIVTLSGLEEDQF | |
| | NASFSTYQDLLKCGLTRAELDHPDNAEKLEDIIKILTIFEDRQRIRTQLSTFKGQFSAEVLKKLERKHYTGWGRLSKKLINGIYDKESGKTILDYLIKDDGVSKHYNRNFMQLINDSQL | |
| | SFKNAIQKAQSSEHEETLSETVNELAGSPAIKKGIYQSLKIVDELVAIMGYAPKRIVVEMARENQTTSTGKRRSIQRLKIVEKAMAEIGSNLLKEQPTTNEQLRDTRLFLYYMQNGKDM | |
| | YTGDELSLHRLSHYDIDHIIPQSFMKDDSLDNLVLVGSTENRGKSDDVPSKEVVKKMKAYWEKLYAAGLISQRKFQRLTKGEQGGLTLEDKAHFIQRQLVETRQITKNVAGILDQRYNA | |
| | KSKEKKVQIITLKASLTSQFRSIFGLYKVREVNDYHHGQDAYLNCVVATTLLKVYPNLAPEFVYGEYPKFQAFKENKAMAKAIIYTNLLRFFTEDEPRFTKDGEILWSNSYLKTIKKEL | |
| | NYHQMNIVKKVEVQKGGFSKESIKPKGPSNKLIPVKNGLDPQKYGGFDSPVVAYTVLFTHEKGKKPLIKQEILGITIMEKTRFEQNPILFLEEKGFLRPRVLMKLPKYTLYEFPEGRRR | |
| | LLASAKEAQKGNQMVLPERLLTLLYHAKQCLLPNQSESLAYVEQHQPEFQEILERVVDFAEVHTLAKSKVQQIVKLFEANQTADVKEIAASFIQLMQFNAMGAPSTFKFFQKDIERARY | |
| | TSIKEIFDATIIYQSTTGLYETRRKVVD | |
| 205 | MKKDYVIGLDIGTNSVGWAVMTEDYQLVKKKMPIYGNTEKKKIKKNFWGVRLFEEGHTAEDRRLKRTARRRISRRRNRLRYLQAFFEEAMTALDENFFARLQESFLVPEDKKWHRHPIF | WP_016622645.1 |
| | AKLEDEVAYHETYPTIYHLRKKLADSSEQADLRLIYLALAHIVKYRGHFLIEGKLSTENISVKEKFQQFMITYNQTFVNGEGRLVSAPLPESVLIEEELTEKASRTKKSEKVLQQFPQE | [Enterococcus |
| | KANGLFGQFLKLMVGNKADFKKVFGLEEEAKITYASESYEEDLEGILAKVGDEYSDVFLAAKNVYDAVELSTILADSDKKSYAKLSSSMIVRFTEHQEDLKKFKRFIRENCPDEYDNLF | faecalis] |
| | KNEQKDGYAGYIAHAGKVSQLKFYQYVKKIIQDIAGAEYFLEKIAQENFLRKQRTFDNGVIPHQIHLAELQAIIHRQAAYYPFLKENQEKIEQLVTFRIPYYVGPLSKGDASTFAWLKR | |
| | QSEEPIRPWNLQETVDLDQSATAFIERMTNFDTYLPSEKVLPKHSLLYEKFMVFNELTKISYTDDRGIKANFSGKEKEKIFDYLFKTRRKVKKKDITQFYRNEYNTEIVTLSGLEEDQF | |
| | NASFSTYQDLLKCGLTRAELDHPDNAEKLEDIIKILTIFEDRQRIRTQLSTFKGQFSAEVLKKLERKHYTGWGRLSKKLINGIYDKESGKTILDYLVKDDGVSKHYNRNFMQLINDSQL | |
| | SFKNAIQKAQSSEHEETLSETVNELAGSPAIKKGIYQSLKIVDELVAIMGYAPKRIVVEMARENQTTSTGKRRSIQRLKIVEKAMAEIGSNLLKEQPTTNEQLRDTRLFLYYMQNGKDM | |
| | YTGDELSLHRLSHYDIDHIIPQSFMKDDSLDNLVLVGSTENRGKSDDVPSKEVVKDMKAYWEKLYAAGLISQRKFQRLTKGEQGGLTLEDKAHFIQRQLVETRQITKNVAGILDQRYNA | |
| | KSKEKKVQIITLKASLTSQFRSIFGLYKVREVNDYHHGQDAYLNCVVATTLLKVYPNLAPEFVYGEYPKFQTFKENKATAKAIIYTNLLRFFTEDEPRFTKDGEILWSNSYLKTIKKEL | |
| | NYHQMNIVKKVEVQKGGFSKESIKPKGPSNKLIPVKNGLDPQKYGGFDSPIVAYTVLFTHEKGKKPLIKQEILGITIMEKTRFEQNPILFLEEKGFLRPRVLMKLPKYTLYEFPEGRRR | |
| | LLASAKEAQKGNQMVLPEHLLTLLYHAKQCLLPNQSESLAYVEQHQPEFQEILERVVDFAEVHTLAKSKVQQIVKLFEANQTADVKEIAASFIQLMQFNAMGAPSTFKFFQKDIERARY | |
| | TSIKEIFDATIIYQSTTGLYETRRKVVD | |
| 206 | MKKDYVIGLDIGTNSVGWAVMTEDYQLVKKKMPIYGNTEKKKIKKNFWGVRLFEEGHTAEDRRLKRTARRRISRRRNRLRYLQAFFEEAMTALDENFFARLQESFLVPEDKKWHRHPIF | WP_002378009.1 |
| | AKLEDEVAYHETYPTIYHLRKKLADSSEQADLRLIYLALAHIVKYRGHFLIEGKLSTENISVKEQFQQFMITYNQTFVNGESRLVSAPLPESVLIEEELTEKASRTKKSEKVLQQFPQE | [Enterococcus |
| | KANGLFGQFLKLMVGNKADFKKVFGLEEEAKITYASESYEEDLEGILAKVGDEYSDVFLAAKNVYDAVELSTILADSDKKSHAKLSSSMIVRFTEHQEDLKNFKRFIRENCPDEYDNLF | faecalis] |
| | KNEQKDGYAGYITHAGKVSQLKFYQYVKKIIQDIAGAEYFLEKIAQENFLRKQRTFDNGVIPHQIHLAELQAIIHRQAAYYPFLKENQEKIEQLVTFRIPYYVGPLSKGDANTFAWLKR | |
| | QSEEPIRPWNLQETVDLDQSATAFIERMTNFDTYLPSEKVLPKHSLLYEKFMVFNELTKISYTDDRGIKANFSGKEKEKIFDYLFKTRRKVKKKDITQFYRNEYNTEIVTLSGLEEDQF | |
| | NASFSTYQDLLKCGLTRAELDHPDNAEKLEDIIKILTIFEDRQRIRTQLSTFKGQFSAEVLKKLERKHYTGWGRLSKKLINGIYDKESGKTILDYLIKDDGVSKHYNRNFMQLINDSQL | |
| | SFKNAIQKAQSSEHEETLSETVNELAGSPAIKKGIYQSLKIVDELVAIMGYAPKRIVVEMARENQTTSTGKRRSIQRLKIVEKAMAEIGSNLLKEQPTTNEQLRDTRLFLYYMQNGKDM | |
| | YTGDELSLHRLSHYDIDHIIPQSFMKDDSLDNLVLVGSTENRGKSDDVPSKEVVKDMKAYWEKLYAAGLISQRKFQRLTKGEQGGLTLEDKAHFIQRQLVETRQITKNVAGILDQRYNA | |
| | KSKEKKVQIITLKASLTSQFRSIFGLYKVREVNDYHHGQDAYLNCVVATTLLKVYPNLAPEFVYGEYPKFQTFKENKATAKAIIYTNLLRFFTEDEPRFTKDGEILWSNSYLKTIKKEL | |
| | NYHQMNIVKKVEVQKGGFSKESIKPKGPSNKLIPVKNGLDPQKYGGFDSPIVAYTVLFTHEKGKKPLIKQEILGITIMEKTRFEQNPILFLEEKGFLRPRVLMKLPKYTLYQFPEGRRR | |
| | LLASAKEAQKGNQMVLPEHLLTLLYHAKQCLLPNQSESLAYVEQHQPEFQEILERVVDFAEVHTLAKSKVQQIVKLFEANQTADVKEIAASFIQLMQFNAMGAPSTFKFFQKDIERARY | |
| | TSIKEIFDATIIYQSTTGLYETRRKVVD | |
| 207 | MKKDYVIGLDIGTNSVGWAVMTEDYQLVKKKMPIYGNTEKKKIKKNFWGVRLFEEGHTAEDRRLKRTARRRISRRRNRLRYLQAFFEEAMTALDENFFARLQESFLVPEDKKWHRHPIF | WP_010775580.1 |
| | AKLEDEVAYHETYPTIYHLRKKLADSSEQADLRLIYLALAHIVKYRGHFLIEGKLSTENISVKEQFQQFMITYNQTFVNGESRLVSAPLPESVLIEEELTEKASRTKKSEKVLQQFPQE | [Enterococcus |
| | KANGLFGQFLKLMVGNKADFKKVFGLEEEAKIKITYASESYEEDLEGILAKVGDEYSDVFLAAKNVYDAVELSTILADSDKKSHAKLSSSMIVRFTEHQEDLKNFKRFIRENCPDEYDN | faecalis] |
| | LFKNEQKDGYAGYIAHAGKVSQLKFYQYVKKIIQDIAGAEYFLEKIAQENFLRKQRTFDNGVIPHQIHLAELQAIIHRQAAYYPFLKENQKKIEQLVTFRIPYYVGPLSKGDASTFAWL | |
| | KRQSEEPIRPWNLQ | |
| | ETVDLDQSATAFIERMTNFDTYLPSEKVLPKHSLLYEKFMVFNELTKISYTDDRGIKANFSGKEKEKIFDYLFKTRRKVKKKDITQFYRNEYNTEIVTLSGLEEDQFNASFSTYQDLLK | |
| | CGLTRAELDHPDNAEKLEDIIKILTIFEDRQRIRTQLSTFKGQFSEEVLKKLERKHYTGWGRLSKKLINGIYDKESGKTILDYLIKDDGVSKHYNRNFMQLINDSQLSFKNAIQKAQSS | |
| | EHEETLSETVNELAGSPAIKKGIYQSLKIVDELVAIMGYAPKRIVVEMARENQTTSTGKRRSIQRLKIVEKAMAEIGSNLLKEQPTTNEQLRDTRLFLYYMQNGKDMYTGDELSLHRLS | |
| | HYDIDHIIPQSFMKDDSLDNLVLVGSTENRGKSDDVPSKEVVKKMKAYWEKLYAAGLISQRKFQRLTKGEQGGLTLEDKAHFIQRQLVETRQITKNVAGILDQRYNAKSKEKKVQIITL | |
| | KASLTSQFRSIFGLYKVREVNDYHHGQDAYLNCVVATTLLKVYPNLAPEFVYGEYPKFQAFKENKATAKAIIYTNLLRFFTEDEPRFTKDGEILWSNSYLKTIKKELNYHQMNIVKKVE | |
| | VQKGGFSKESIKPKGPSNKLIPVKNGLDPQKYGGFDSPVVAYTVLFTHEKGKKPLIKQEILGITIMEKTRFEQNPILFLEEKGFLRPRVLMKLPKYTLYEFPEGRRRLLASAKEAQKGN | |
| | QMVLPEHLLTLLYHAKQCLLPNQSESLAYVEQHQPEFQEILERVVDFAEVHTLAKSKVQQIVKLFEANQTADVKEIAASFIQLMQFNAMGAPSTFKFFQKDIERARYTSIKEIFDATII | |
| | YQSTTGLYETRRKVVD | |
| 208 | MKKDYVIGLDIGTNSVGWAVMTEDYQLVKKKMPIYGNTEKKKIKKNFWGVRLFEEGHTAEDRRLKRTARRRISRRRNRLRYLQAFFEEAMTALDENFFARLQESFLVPEDKKWHRHPIF | WP_010818269.1 |
| | AKLEDEVAYHETYPTIYHLRKKLADSSEQADLRLIYLALAHIVKYRGHFLIEGKLSTENISVKEQFQQFMITYNQTFVNGESRLVSAPLPESVLIEEELTEKASRTKKSEKVLQQFPQE | [Enterococcus |
| | KANGLFGQFLKLMVGNKADFKKVFGLEEEAKITYASESYEEDLEGILAKVGDEYSDVFLAAKNVYDAVELSTILADSDKKSHAKLSSSMIVRFTEHQEDLKKFKRFIRENCPDEYDNLF | faecalis] |
| | KNEQKDGYAGYIAHAGKVSQLKFYQYVKKIIQDIAGAEYFLEKIAQENFLRKQRTFDNGVIPHQIHLAELQAIIHRQAAYYPFLKENQEKIEQLVTFRIPYYVGPLSKGDASTFAWLKR | |
| | QSEEPIRPWNLQETVDLDQSATAFIERMTNFDTYLPSEKVLPKHSLLYEKFMVFNELTKISYTDDRGIKANFSGKEKEKIFDYLFKTRRKVKKKDITQFYRNEYNTEIVTLSGLEEDQF | |
| | NASFSTYQDLLKCGLTRAELDHPDNAEKLEDIIKILTIFEDRQRIRTQLSTFKGQFSAEVLKKLERKHYTGWGRLSKKLINGIYDKESGKTILGYLIKDDGVSKHYNRNFMQLINDSQL | |
| | SFKNAIQKAQSSEHEETLSETVNELAGSPAIKKGIYQSLKIVDELVAIMGYAPKRIVVEMARENQTTSTGKRRSIQRLKIVEKAMAEIGSNLLKEQPTTNEQLRDTRLFLYYMQNGKDM | |
| | YTGDELSLHRLSHYDIDHIIPQSFMKDDSLDNLVLVGSTENRGKSDDVPSKEVVKDMKAYWEKLYAAGLISQRKFQRLTKGEQGGLTLEDKAHFIQRQLVETRQITKNVAGILDQRYNA | |
| | KSKEKKVQIITLKASLTSQFRSIFGLYKVREVNDYHHGQDAYLNCVVATTLLKVYPNLAPEFVYGEYPKFQTFKENKATAKAIIYTNLLRFFTEDEPRFTKDGEILWSNSYLKTIKKEL | |
| | NYHQMNIVKKVEVQKGGFSKESIKPKGPSNKLIPVKNGLDPQKYGGFDSPIVAYTVLFTHEKGKKPLIKQEILGITIMEKTRFEQNPILFLEEKGFLRPRVLMKLPKYTLYEFPEGRRR | |
| | LLASAKEAQKGNQMVLPEHLLTLLYHAKQCLLPNQSESLAYVEQHQPEFQEILERVVDFAEVHTLAKSKVQQIVKLFEANQTADVKEIAASFIQLMQFNAMGAPSTFKFFQKDIERARY | |
| | TSIKEIFDATIIYQSTTGLYETRRKVVD | |
| 209 | MKKDYVIGLDIGTNSVGWAVMTEDYQLVKKKMPIYGNTEKKKIKKNFWGVRLFEEGHTAEDRRLKRTARRRISRRRNRLRYLQAFFEEAMTALDENFFARLQESFLVPEDKKWHRHPIF | WP_033625576.1 |
| | AKLEDEVAYHETYPTIYHLRKKLADSSEQADLRLIYLALAHIVKYRGHFLIEGKLSTENISVKEQFQQFMITYNQTFVNGESRLVSAPLPESVLIEEELTEKASRTKKSEKVLQQFPQE | [Enterococcus |
| | KANGLFGQFLKLMVGNKADFKKVFGLEEEAKITYASESYEEDLEGILAKVGDEYSDVFLAAKNVYDAVELSTILADSDKKSHAKLSSSMIVRFTEHQEDLKKFKRFIRENCPDEYDNLF | faecalis] |
| | KNEQKDGYAGYIAHAGKVSQLKFYQYVKKIIQDIAGAEYFLEKIAQENFLRKQRTFDNGVIPHQIHLAELQAIIHRQAAYYPFLKENQEKIEQLVTFRIPYYVGPLSKGDASTFAWLKR | |
| | QNEKPIRPWNLQETVDLDQSATAFIERMTNFDTYLPSEKVLPKHSLLYEKFMVFNELTKISYTDDRGIKANFSGKEKEKIFDYLFKTRRKVKKKDITQFYRNEYNTEIVTLSGLEEDQF | |
| | NASFSTYQDLLKCGLTRAELDHPDNAEKLEDIIKILTIFEDRQRIRTQLSTFKGQFSAEVLKKLERKHYTGWGRLSKKLINGIYDKESGKTILDYLIKDDGVSKHYNRNFMQLINDSQL | |
| | SFKNAIQKAQSSEHEETLSETVNELAGSPAIKKGIYQSLKIVDELVAIMGYAPKRIVVEMARENQTTSTGKRRSIQRLKIVEKAMAEIGSNLLKEQPTTNEQLRDTRLFLYYMQNGKDM | |
| | YTGDELSLHRLSHYDIDHIIPQSFMKDDSLDNLVLVGSTENRGKSDDVPSKEVVKKMKAYWEKLYAAGLISQRKFQRLTKGEQGGLTLEDKAHFIQRQLVETRQITKNVAGILDQRYNA | |
| | KSKEKKVQIITLKASLTSQFRSIFGLYKVREVNDYHHGQDAYLNCVVATTLLKVYPNLAPEFVYGEYPKFQAFKENKATAKAIIYTNLMRFFTEVEPRFTKDGEILWSNSYLKTIKKEL | |
| | NYHQMNIVKKVEVQKGGFSKESIKPKGPSNKLIPVKNGLDPQKYGGFDSPVVAYTVLFTHEKGKKPLIKQEILGITIMEKTKFEQNPILFLEEKGFLRPRVLMKLPKYTLYEFPEGRRR | |
| | LLASAKEAQKGNQMVLPEHLLTLLYHAKQCLLPNQSESLAYVEQHQPEFQEILERVVDFAEVHTLAKSKVQQIVKLFETNQTADVKEIAASFIQLMQFNAMGAPSTFKFFQKDIERARY | |
| | TSIKEIFDATIIYQSTTGLYETRRKVVD | |
| 210 | MKKDYVIGLDIGTNSVGWAVMTEDYQLVKKKMPIYGNTEKKKIKKNFWGVRLFEEGHTAEDRRLKRTARRRISRRRNRLRYLQAFFEEAMTALDENFFARLQESFLVPEDKKWHRHPIF | WP_033789179.1 |
| | AKLEDEVAYHETYPTIYHLRKKLADSSEQADLRLIYLALAHIVKYRGHFLIEGKLSTENISVKEQFQQFMITYNQTFVNGESRLVSAPLPESVLIEEELTEKASRTKKSEKVLQQFPQE | [Enterococcus |
| | KANGLFGQFLKLMVGNKADFKKVFGLEEEAKITYASESYEEDLEGILAKVGDEYSDVFLAAKNVYDAVELSTILADSDKKSHAKLSSSMIVRFTEHQEDLKNFKRFIRENCPDEYDNLF | faecalis] |
| | KNEQKDGYAGYIAHAGKVSQLKFYQYVKKIIQDIAGAEYFLEKIAQENFLRKQRTFDNGVIPHQIHLAELQAIIHRQAAYYPFLKENQKKIEQLVTFRIPYYVGPLSKGDASTFAWLKR | |
| | QSEEPIRPWNLQETVDLDQSATAFIERMTNFDTYLPSEKVLPKHSLLYEKFMVFNELTKISYTDDRGIKANFSGKEKEKIFDYLFKTRRKVKKKDITQFYRNEYNTEIVTLSGLEEDQF | |
| | NASFSTYQDLLKCGLTRAELDHPDNAEKLEDIIKILTIFEDRQRIRTQLSTFKGQFSEEVLKKLERKHYTGWGRLSKKLINGIYDKESGKTILDYLIKDDGVSKHYNRNFMQLINDSQL | |
| | SFKNAIQKAQSSEHEETLSETVNELAGSPAIKKGIYQSLKIVDELVAIMGYAPKRIVVEMARENQTTSTGKRRSIQRLKIVEKAMAEIGSNLLKEQPTTNEQLRDTRLFLYYMQNGKDM | |
| | YTGDELSLHRLSHYDIDHIIPQSFMKDDSLDNLVLVGSTENRGKSDDVPSKEVVKKMKAYWEKLYAAGLISQRKFQRLTKGEQGGLTLEDKAHFIQRQLVETRQITKNVAGILDQRYNA | |
| | KSKEKKVQIITLKASLTSQFRSIFGLYKVREVNDYHHGQDAYLNCVVATTLLKVYPNLAPEFVYGEYPKFQAFKENKATAKAIIYTNLLRFFTEDEPRFTKDGEILWSNSYLKTIKKEL | |
| | NYHQMNIVKKVEVQKGGFSKESIKPKGPSNKLIPVKNGLDPQKYGGFDSPVVAYTVLFTHEKGKKPLIKQEILGITIMEKTRFEQNPILFLEEKGFLRPRVLMKLPKYTLYEFPEGRRR | |
| | LLASAKEAQKGNQMVLPEHLLTLLYHAKQCLLPNQSESLAYVEQHQPEFQEILERVVDFAEVHTLAKSKVQQIVKLFEANQTADVKEIAASFIQLMQFNAMGAPSTFKFFQKDIERARY | |
| | TSIKEIFDATIIYQSTTGLYETRRKVVD | |
| 211 | MKKDYVIGLDIGTNSVGWAVMTEDYQLVKKKMPIYGNTEKKKIKKNFWGVRLFEEGHTAEDRRLKRTARRRISRRRNRLRYLQAFFEEAMTALDENFFARLQESFLVPEDKKWHRHPIF | WP_002407324.1 |
| | AKLEDEVAYHETYPTIYHLRKKLADSSEQADLRLIYLALAHIVKYRGHFLIEGKLSTENISVKEQFQQFMITYNQTFVNGESRLVSTPLPESVLIEEELTEKASRTKKSEKVLQQFPQE | [Enterococcus |
| | KANGLFGQFLKLMVGNKADFKKVFGLEEEAKITYASESYEEDLEGILAKVGDEYSDVFLAAKNVYDAVELSTILADSDKKSHAKLSSSMIVRFTEHQEDLKNFKRFIRENCPDEYDNLF | faecalis] |
| | KNEQKDGYAGYITHAGKVSQLKFYQYVKKIIQDIAGAEYFLEKIAQENFLRKQRTFDNGVIPHQIHLAELQAIIHRQAAYYPFLKENQEKIEQLVTFRIPYYVGPLSKGDASTFAWLKR | |
| | QSEEPIRPWNLQETVDLDQSATAFIERMTNFDTYLPSEKVLPKHSLLYEKFMVFNELTKISYTDDRGIKANFSGKEKEKIFDYLFKTRRKVKKKDITQFYRNEYNTEIVTLSGLEEDQF | |
| | NASFSTYQDLLKCGLTRAELDHPDNAEKLEDIIKILTIFEDRQRIRTQLSTFKGQFSAEVLKKLERKHYTGWGRLSKKLINGIYDKESGKTILDYLVKDDGVSKHYNRNFMQLINDSQL | |
| | SFKNAIQKAQSSEHEETLSETVNELAGSPAIKKGIYQSLKIVDELVAIMGYAPKRIVVEMARENQTTSTGKRRSIQRLKIVEKAMAEIGSNLLKEQPTTNEQLRDTRLFLYYMQNGKDM | |
| | YTGDELSLHRLSHYDIDHIIPQSFMKDDSLDNLVLVGSTENRGKSDDVPSKEVVKDMKAYWEKLYAAGLISQRKFQRLTKGEQGGLTLEDKAHFIQRQLVETRQITKNVAGILDQRYNA | |
| | KSKEKKVQIITLKASLTSQFRSIFGLYKVREVNDYHHGQDAYLNCVVATTLLKVYPNLAPEFVYGEYPKFQTFKENKATAKAIIYTNLLRFFTEDEPRFTKDGEILWSNSYLKTIKKEL | |
| | NYHQMNIVKKVEVQKGGFSKESIKPKGPSNKLIPVKNGLDPQKYGGFDSPIVAYTVLFTHEKGKKPLIKQEILGITIMEKTRFEQNPILFLEEKGFLRPRVLMKLPKYTLYEFPEGRRR | |
| | LLASAKEAQKGNQMVLPEHLLTLLYHAKQCLLPNQSESLAYVEQHQPEFQEILERVVDFAEVHTLAKSKVQQIVKLFEANQTADVKEIAASFIQLMQFNAMGAPSTFKFFQKDIERARY | |
| | TSIKEIFDATIIYQSTTGLYETRRKVVD | |
| 212 | MKKDYVIGLDIGTNSVGWAVMTEDYQLVKKKMPIYGNTEKKKIKKNFWGVRLFEEGHTAEDRRLKRTARRRISRRRNRLRYLQAFFEEAMTDLDENFFARLQESFLVPEDKKWHRHPIF | WP_002364836.1 |
| | AKLEDEVAYHETYPTIYHLRKKLADSSEQADLRLIYLALAHIVKYRGHFLIEGKLSTENISVKEQFQQFMITYNQTFVNGESRLVSAPLPESVLIEEELTEKASRTKKSEKVLQQFPQE | MULTISPECIES: |
| | KANGLFGQFLKLMVGNKADFKKVFGLEEEAKITYASESYEEDLEGILAKVGDEYSDVFLAAKNVYDAVELSTILADSDKKSHAKLSSSMIVRFTEHQEDLKKFKRFIRENCPDEYDNLF | [Enterococcus] |
| | KNEQKDGYAGYIAHAGKVSQLKFYQYVKKIIQDIAGAEYFLEKIAQENFLRKQRTFDNGVIPHQIHLAELQAIIHRQAAYYPFLKENQEKIEQLVTFRIPYYVGPLSKGDASTFAWLKR | |
| | QSEEPIRPWNLQETVDLDQSATAFIERMTNFDTYLPSEKVLPKHSLLYEKFMVFNELTKISYTDDRGIKANFSGKEKEKIFDYLFKTRRKVKKKDITQFYRNEYNTEIVTLSGLEEDQF | |
| | NASFSTYQDLLKCGLTRAELDHPDNAEKLEDIIKILTIFEDRQRIRTQLSTFKGQFSAEVLKKLERKHYTGWGRLSKKLINGIYDKESGKTILGYLIKDDGVSKHYNRNFMQLINDSQL | |
| | SFKNAIQKAQSSEHEETLSETVNELAGSPAIKKGIYQSLKIVDELVAIMGYAPKRIVVEMARENQTTSTGKRRSIQRLKIVEKAMAEIGSNLLKEQPTTNEQLRDTRLFLYYMQNGKDM | |
| | YTGDELSLHRLSHYDIDHIIPQSFMKDDSLDNLVLVGSTENRGKSDDVPSKEVVKDMKAYWEKLYAAGLISQRKFQRLTKGEQGGLTLEDKAHFIQRQLVETRQITKNVAGILDQRYNA | |
| | NSKEKKVQIITLKASLTSQFRSIFGLYKVREVNDYHHGQDAYLNCVVATTLLKVYPNLAPEFVYGEYPKFQTFKENKATAKAIIYTNLLRFFTEDEPRFTKDGEILWSNSYLKTIKKEL | |
| | NYHQMNIVKKVEVQKGGFSKESIKPKGPSNKLIPVKNGLDPQKYGGFDSPIVAYTVLFTHEKGKKPLIKQEILGITIMEKTRFEQNPILFLEEKGFLRPRVLMKLPKYTLYEFPEGRRR | |
| | LLASAKEAQKGNQMVLPEHLLTLLYHAKQCLLPNQSESLAYVEQHQPEFQEILERVVDFAEVHTLAKSKVQQIVKLFEANQTADVKEIAASFIQLMQFNAMGAPSTFKFFQKDIERARY | |
| | TSIKEIFDATIIYQSTTGLYETRRKVVD | |
| 213 | MKKDYVIGLDIGTNSVGWAVMTEDYQLVKKKMPIYGNTEKKKIKKNFWGVRLFEEGHTAEDRRLKRTARRRISRRRNRLRYLQAFFEEAMTDLDENFFARLQESFLVPEDKKWHRHPIF | WP_002413717.1 |
| | AKLEDEVAYHETYPTIYHLRKKLADSSEQADLRLIYLALAHIVKYRGHFLIEGKLSTENISVKEQFQQFMITYNQTFVNGESRLVSAPLPESVLIEEELTEKASRTKKSEKVLQQFPQE | [Enterococcus |
| | KANGLFGQFLKLMVGNKADFKKVFGLEEEAKITYASESYEEDLEGILAKVGDEYSDVFLAAKNVYDAVELSTILADSDKKSHAKLSSSMIVRFTEHQEDLKKFKRFIRENCPDEYDNLF | faecalis] |
| | KNEQKDGYAGYIAHAGKVSQLKFYQYVKKIIQDIAGAEYFLEKIAQENFLRKQRTFDNGVIPHQIHLAELQAIIHRQAAYYPFLKENQEKIEQLVTFRIPYYVGPLSKGDASTFAWLKR | |
| | QSEEPIRPWNLQETVDLDQSATAFIERMTNFDTYLPSEKVLPKHSLLYEKFMVFNELTKISYTDDRGIKANFSGKEKEKIFDYLFKTRRKVKKKDITQFYRNEYNTEIVTLSGLEEDQF | |
| | NASFSTYQDLLKCGLTRAELDHPDNAEKLEDIIKILTIFEDRQRIRTQLSTFKGQFSAEVLKKLERKHYTGWGRLSKKLINGIYDKESGKTILDYLVKDDGVSKHYNRNFMQLINDSQL | |
| | SFKNAIQKAQSSEHEETLSETVNELAGSPAIKKGIYQSLKIVDELVAIMGYAPKRIVVEMARENQTTSTGKRRSIQRLKIVEKAMAEIGSNLLKEQPTTNEQLRDTRLFLYYMQNGKDM | |
| | YTGDELSLHRLSHYDIDHIIPQSFMKDDSLDNLVLVGSTENRGKSDDVPSKEVVKDMKAYWEKLYAAGLISQRKFQRLTKGEQGGLTLEDKAHFIQRQLVETRQITKNVAGILNQRYNA | |
| | NSKEKKVQIITLKASLTSQFRSIFGLYKVREVNDYHHGQDAYLNCVVATTLLKVYPNLAPEFVYGEYPKFQTFKENKATAKAIIYTNLLRFFTEDEPRFTKDGEILWSNSYLKTIKKEL | |
| | NYHQMNIVKKVEVQKGGFSKESIKPKGPSNKLIPVKNGLDPQKYGGFDSPVVAYTVLFTHEKGKKPLIKQEILGITIMEKTRFEQNPILFLEEKGFLRPRVLMKLPKYTLYEFPEGRRR | |
| | LLASAKEAQKGNQMVLPEHLLTLLYHAKQCLLPNQSESLAYVEQHQPEFQEILERVVDFAEVHTLAKSKVQQIVKLFEANQTADVKEIAASFIQLMQFNAMGAPSTFKFFQKDIERARY | |
| | TSIKEIFDATIIYQSTTGLYETRRKVVD | |
| 214 | MKKDYVIGLDIGTNSVGWAVMTEDYQLVKKKMPIYGNTEKKKIKKNFWGVRLFEEGHTAEDRRLKRTARRRISRRRNRLRYLQAFFEEAMTDLDENFFARLQESFLVPEDKKWHRHPIF | WP_002373311.1 |
| | AKLEDEVAYHETYPTIYHLRKKLADSSEQADLRLIYLALAHIVKYRGHFLIEGKLSTENTSVKEQFQQFMVIYNQTFVNGESRLVSAPLPESVLIEEELTEKASRTKKSEKVLQQFPQE | [Enterococcus |
| | KANGLFGQFLKLMVGNKADFKKVFGLEEEAKITYASESYEEDLEGILAKVGDEYSDVFLAAKNVYDAVELSTILADSDKKSHAKLSSSMIVRFTEHQEDLKKFKRFIRENCPDEYDNLF | faecalis] |
| | KNEQKDGYAGYIAHAGKVSQLKFYQYVKKIIQDIAGAEYFLEKIAQENFLRKQRTFDNGVIPHQIHLAELQAIIHRQAAYYPFLKENQEKIEQLVTFRIPYYVGPLSKGDASTFAWLKR | |
| | QSEEPIRPWNLQETVDLDQSATAFIERMTNFDTYLPSEKVLPKHSLLYEKFMVFNELTKISYTDDRGIKANFSGKEKEKIFDYLFKTRRKVKKKDITQFYRNEYNTEIVTLSGLEEDQF | |
| | NASFSTYQDLLKCGLTRAELDHPDNAEKLEDIIKILTIFEDRQRIRTQLSTFKGQFSAEVLKKLERKHYTGWGRLSKKLINGIYDKESGKTILDYLVKDDGVSKHYNRNFMQLINDSQL | |
| | SFKNAIQKAQSSEHEETLSETVNELAGSPAIKKGIYQSLKIVDELVAIMGYAPKRIVVEMARENQTTSTGKRRSIQRLKIVEKAMAEIGSNLLKEQPTTNEQLRDTRLFLYYMQNGKDM | |
| | YTGDELSLHRLSHYDIDHIIPQSFMKDDSLDNLVLVGSTENRGKSDDVPSKKVVKKMKAYWEKLYAAGLISQRKFQRLTKGEQGGLTLEDKAHFIQRQLVETRQITKNVAGILDQRYNA | |
| | KSKEKKVQIITLKASLTSQFRSIFGLYKVREVNDYHHGQDAYLNCVVATTLLKVYPNLAPEFVYGEYPKFQAFKENKATAKTITYTNLMRFFTEDEPRFTKDSEILWSNSYLKTIKKEL | |
| | NYHQMNIVKKVEVQKGGFSKESIKPKGPSNKLIPVKNGLDPQKYGGFDSPVVAYTVLFTHEKGKKPLIKQEILGITIMEKTRFEQNPILFLEEKGFLRPRVLMKLPKYTLYEFPEGRRR | |
| | LLASAKEAQKGNQMVLPEHLLTLLYHAKQCLLPNQSESLAYVEQHQPEFQEILERVVDFAEVHTLAKSKVQQIVKLFEANQTADVKEIAASFIQLMQFNAMGAPSTFKFFQKDIERARY | |
| | TSIKEIFDATIIYQSTTGLYETRRKVVD | |
| 215 | MKKEYTIGLDIGTNSVGWAVLTENYDLVKKKMKVYGNTETKYLKKNLWGVRLFDEGETAADRRLKRTTRRRYSRRRNRICRLQDLFTEEMNQVDANFFHRLQESFLVPDEKEFERHAIF | WP_010770040.1 |
| | GKMEEEVSYYREFPTIYHLRKHLADTSEQADLRLVYLALAHIVKYRGHFLIEGELNTENSSVSETFRTFIQVYNQIFRENEVPLAVPDNIEELFSEKVSRARKVEAILSVYSEEKSTGT | [Enterococcus |
| | LAQFLKLMVGNQGRFKKTFDLEEDGIIQIPKEEYEEELETLLAIIGDEYAEIFSATKSVYDAVALSGILSVTDGDTKAKLSASMVERYEAHQKDLVQFKQFIRKELPEMYAPIFRDNSV | phoeniculicola] |
| | SGYAGYVENSKVVTQAEFYKYIKKAIEKVPGAEYFLEKIEQETFLDKQRTFNNGVIPHQIHLEELEATIQKQATYYPFLADNKEEMKQLVTFRIPYYVGPLADGNSPFAWLERISSEPI | |
| | RPGNLAEVVDIKKSATKFIERMTNFDTYLPTEKVLPKHSMIYEKYMVYNELTKVSYVDERGMNQRFSGEEKKQIVEELFKQSRKVTKKLLEKFLSNEFGLVDVAIKGIETSFNAGYGTY | |
| | HDFLKIGITREQLDKEENSETLEEIVKILTVFEDRKMIREQLKKYTYLFDEEVLKKLERRHYTGWGRLSAKLLIGIKEKRTHKTILDYLIEDDGGKQPINRNLMQLINDSDLSFKSEIA | |
| | EAQSDMNTEDLHEVVQNLAGSPAIKKGILQSLKIVDELVDIMGSLPKNIVVEMARENQTTSRGRTNSNPRMKALEEAMRNLRSNLLKEYPTDNQALQNDRLYLYYLQNGKDMYTGLDLS | |
| | LHNLSSYDIDHIVPQSFTTDNSLDNRVLVSSKENRGKKDDVPSKEVVQKNITLWETLKNSNLISQKKYDNLTKGLRGGLTEDDRAHFIKRQLVETRQITKHVARILDQRFNSQKDEEGK | |
| | TIRAVRVVTLKSSLTSQFRKQFAIHKVREINDYHHGHDAYLNGVVANSLLRVYPQLQPEFVYGDYPKFNAYKANKATAKKQLYTNIMKFFAEDAVIIDENGEILWDKKNIATVKKVMSY | |
| | PQMNIVKKPEIQTGSFSKETIKPKGDSDKLISRKTNWSPKLYGGFDSPQVAYSVIITYEKGKKKVRAKAIVGITIMEQSLFKKDPVSLLEEKGYANPEVLIHLPKYTLYELENGRRRLL | |
| | ASANEAQKGNQLVLPASLVTLLYHAKQVDEDSGKSEEYVREHRAEFAEILNYVQAFSETKILANKNLQTILKLYEENKEADIKEIAESFVNLMKFSAYGAPMDFKFFGKTIPRSRYTSV | |
| | GELLSATIINQSITGLYETRRKLVD | |
| 216 | MKKEYTIGLDIGTNSVGWSVLTDDYRLVSKKMKVAGNTEKSSTKKNFWGVRLFDEGQTAEARRSKRTARRRLARRRQRILELQKIFAPEILKIDEHFFARLNESFLVLDEKKQSRHPVF | WP_002310644.1 |
| | ATIKQEKSYHQTYPTIYHLRQALADSSEKADIRLVYLAMAHLLKYRGHFLIEGELNTENSSVTETFRQFLSTYNQQFSEADDKQTEKLDEAVDCSFVFTEKMSKTKKAETLLKYFPHEK | [Enterococcus |
| | SNGYLSQFIKLMVGNQGNFKNVFGLEEAKLQFSKETYEEDLEELLEKIGDDYIDLFVQAKNVYDAVLLSEILSDSTKNTRAKLSAGMIRRYDAHKEDLVLLKRFVKENLPKKYRAFFGD | faecium] |
| | NSVNGYAGYIEGHATQEDFYKFVKKELTGIRGSEVFLTKIEQENFLRKQRTFDNGVIPHQIHLTELRAIIANQKKHYPFLKEEQEKLESLLTFKIPYYVGPLAKKQENSPFAWLIRKSE | |
| | EKIKPWNLPEIVDMEGSAVRFIERMINTDMYMPHNKVLPKNSLLYQKFSIYNELTKVRYQDERGQMNYFSSIEKKEIFHELFEKNRKVTKKDLQEFLYLKYDIKHAELSGIEKAFNASY | |
| | TTYHDFLTMSENKREMKQWLEDPELASMFEEIIKTLTVFEDREMIKTRLSHHEATLGKHIIKKLTKKHYTGWGRLSKELIQGIRDKQSNKTILDYLINDDDFPHHRNRNFMQLINDDSL | |
| | SFKKEIKKAQMITDTENLEEIVKELTGSPAIKKGILQSLKIVDEIVGIMGYEPANIVVEMARENQTTGRGLKSSRPRLKALEESLKDFGSQLLKEYPTDNSSLQKDRLYLYYLQNGRDM | |
| | YTGAPLDIHRLSDYDIDHIIPRSFTTDNSIDNKVLVSSKENRLKKDDVPSEKVVKKMRSFWYDLYSSKLISKRKLDNLTKIKLTEEDKAGFIKRQLVETRQITKHVAGILHHRFNKAED | |
| | TNEPIRKVRIITLKSALVSQFRNRFGIYKVREINEYHHAHDAYLNGVVALALLKKYPQLAPEFVYGEYLKFNAHKANKATVKKEFYSNIMKFFESDTPVCDENGEIFWDKSKSIAQVKK | |
| | VINHHHMNIVKKTEIQKGGFSKETVEPKKDSSKLLPRKNNWDPAKYGGLGSPNVAYTVAFTYEKGKARKRTNALEGITIMEREAFEQSPVLFLKNKGYEQAEIEMKLPKYALFELENGR | |
| | KRMVASNKEAQKANSFLLPEHLVTLLYHAKQYDEISHKESFDYVNEHHKEFSEVFARVLEFAGKYTLAEKNIEKLEKIYKENQTDDLAKLASSFVNLMQFNAMGAPADFKFFDVTIPRK | |
| | RYTSLTEIWQSTIIHQSITGLYETRIRMGK | |
| 217 | MKKEYTIGLDIGTNSVGWSVLTDDYRLVSKKMKVAGNTEKSSTKKNFWGVRLFDEGQTAEARRSKRTARRRLARRRQRILELQKIFAPEILKIDEHFFARLNESFLVLDEKKQSRHPVF | WP_002314015.1 |
| | ATIKQEKSYHQTYPTIYHLRQALADSSEKADIRLVYLAMAHLLKYRGHFLIEGELNTENSSVTETFRQFLSTYNQQFSEADDKQTEKLDEAVDCSFVFTEKMSKTKKAETLLKYFPHEK | [Enterococcus |
| | SNGYLSQFIKLMVGNQGNFKNVFGLEEEAKLQFSKETYEEDLEELLEKIGDDYIDLFVQAKNVYDAVLLSEILSDSTKNTRAKLSAGMIRRYDAHKEDLVLLKRFVKENLPKKYRAFFG | faecium] |
| | DNSVNGYAGYIEGHATQEDFYKFVKKELTGIRGSEVFLTKIEQENFLRKQRTFDNGVIPHQIHLTELRAIIANQKKHYPFLKEEQEKLESLLTFKIPYYVGPLAKKQENSPFAWLIRKS | |
| | EEKIKPWNLPEIVDMEGSAVRFIERMNNTDMYIPHNKVLPKNSLLYQKFSIYNELTKVRYQDERGQMNYFSSIEKKEIFHELFEKNRKVTKKDLQEFLYLKYDIKHAELSGIEKAFNAS | |
| | YTTYHDFLTMSENKREMKQWLEDPELASMFEEIIKTLTVFEDREMIKTRLSHHEATLGKHIIKKLTKKHYTGWGRLSKELIQGIRDKQSNKTILDYLINDDDFPHHRNRNFMQLINDDS | |
| | LSFKKEIKKAQMITDTENLEEIVKELTGSPAIKKGILQSLKIVDEIVGIMGYEPANIVVEMARENQTTGRGLKSSRPRLKALEESLKDFGSQLLKEYPTDNSSLQKDRLYLYYLQNGRD | |
| | MYTGAPLDIHRLSDYDIDHIIPRSFTTDNSIDNKVLVSSKENRLKKDDVPSEKVVKKMRSFWYDLYSSKLISKRKLDNLTKIKLTEEDKAGFIKRQLVETRQITKHVAGILHHRFNKAE | |
| | DTNEPIRKVRIITLKSALVSQFRNRFGIYKVREINEYHHAHDAYLNGVVALALLKKYPQLAPEFVYGEYLKFNAHKANKATVKKEFYSNIMKFFESDTPVCDENGEIFWDKSKSIAQVK | |
| | KVINHHHMNIVKKTEIQKGGFSKETVEPKKDSSKLLPRKNNWDPAKYGGLGSPNVAYTVAFTYEKGKARKRTNALEGITIMEREAFEQSPVLFLKNKGYEQAEIEMKLPKYALFELENG | |
| | RKRMVASNKEAQKANSFLLPEHLVTLLYHAKQYDEISHKESFDYVNEHHKEFSEVFARVLEFAGKYTLAEKNIEKLEKIYKENQTDDLAKLASSFVNLMQFNAMGAPADFKFFDVTIPR | |
| | KRYTSLTEIWQSTIIHQSITGLYETRIRMGK | |
| 218 | MKKEYTIGLDIGTNSVGWSVLTDDYRLVSKKMKVAGNTEKSSTKKNFWGVRLFDEGQTAEARRSKRTARRRLARRRQRILELQKIFAPEILKIDEHFFARLNESFLVLDEKKQSRHPVF | WP_002320716.1 |
| | ATIKQEKSYHQTYPTIYHLRQALADSSEKADIRLVYLAMAHLLKYRGHFLIEGELNTENSSVTETFRQFLSTYNQQFSEADDKQTEKLDEAVDCSFVFTEKMSKTKKAETLLKYFPHEK | [Enterococcus |
| | SNGYLSQFIKLMVGNQGNFKNVFGLEEEAKLQFSKETYEEDLEELLEKIGDDYIDLFVQAKNVYDAVLLSEILSDSTKNTRAKLSAGMIRRYDAHKEDLVLLKRFVKENLPKKYRAFFG | faecium] |
| | DNSVNGYAGYIEGHATQEDFYKFVKKELTGIRGSEVFLTKIEQENFLRKQRTFDNGVIPHQIHLTELRAIIANQKKHYPFLKEEQEKLESLLTFKIPYYVGPLAKKQENSPFAWLIRKS | |
| | EEKIKPWNLPEIVDMEGSAVRFIERMINTDMYIPHNKVLPKNSLLYQKFSIYNELTKVRYQDERGQMNYFSSIEKKEIFHELFEKNRKVTKKDLQEFLYLKYDIKHAELSGIEKAFNAS | |
| | YTTYHDFLTMSENKREMKQWLEDPELASMFEEIIKTLTVFEDREMIKTRLSHHEATLGKHIIKKLTKKHYTGWGRLSKELIQGIRDKQSNKTILDYLINDDDFPHHRNRNFMQLINDDS | |
| | LSFKKEIKKAQMITDTENLEEIVKELTGSPAIKKGILQSLKIVDEIVGIMGYEPANIVVEMARENQTTGRGLKSSRPRLKALEESLKDFGSQLLKEYPTDNSSLQKDRLYLYYLQNGRD | |
| | MYTGAPLDIHRLSDYDIDHIIPRSFTTDNSIDNKVLVSSKENRLKKDDVPSEKVVKKMRSFWYDLYSSKLISKRKLDNLTKIKLTEEDKAGFIKRQLVETRQITKHVAGILHHRFNKAE | |
| | DTNEPIRKVRIITLKSALVSQFRNRFGIYKVREINEYHHAHDAYLNGVVALALLKKYPQLAPEFVYGEYLKFNAHKANKATVKKEFYSNIMKFFESDTPVCDENGEIFWDKSKSIAQVK | |
| | KVINHHHMNIVKKTEIQKGGFSKETVEPKKDSSKLLPRKNNWDPAKYGGLGSPNVAYTVAFTYEKGKARKRTNALEGITIMEREAFEQSPVLFLKNKGYEQAEIEMKLPKYALFELENG | |
| | RKRMVASNKEAQKANSFLLPEHLVTLLYHAKQYDEISHKESFDYVNEHHKEFSEVFARVLEFAGKYTLAEKNIEKLEKIYKENQTDDLAKLASSFVNLMQFNAMGAPADFKFFDVTIPR | |
| | KRYTSLTEIWQSTIIHQSITGLYETRIRMGK | |
| 219 | MKKEYTIGLDIGTNSVGWSVLTDDYRLVSKKMKVAGNTEKSSTKKNFWGVRLFDEGQTAEARRSKRTARRRLARRRQRILELQKIFAPEILKIDEHFFARLNESFLVLDEKKQSRHPVF | WP_002330729.1 |
| | ATIKQEKSYHQTYPTIYHLRQALADSSEKADIRLVYLAMAHLLKYRGHFLIEGELNTENSSVTETFRQFLSTYNQQFSEADDKQTEKLDEAVDCSFVFTEKMSKTKKAETLLKYFPHEK | [Enterococcus |
| | SNGYLSQFIKLMVGNQGNFKNVFGLEEAKLQFSKETYEEDLEELLEKIGDDYIDLFVQAKNVYDAVLLSEILSDSTKNTRAKLSAGMIRRYDAHKEDLVLLKRFVKENLPKKYRAFFGD | faecium] |
| | NSVNGYAGYIEGHATQEDFYKFVKKELTGIRGSEVFLTKIEQENFLRKQRTFDNGVIPHQIHLTELRAIIANQKKHYPFLKEEQEKLESLLTFKIPYYVGPLAKKQENSPFAWLIRKSE | |
| | EKIKPWNLPEIVDMEGSAVRFIERMINTDMYIPHNKVLPKNSLLYQKFSIYNELTKVRYQDERGQMNYFSSIEKKEIFHELFEKNRKVTKKDLQEFLYLKYDIKHAELSGIEKAFNASY | |
| | TTYHDFLTMSENKREMKQWLEDPELASMFEEIIKTLTVFEDREMIKTRLSHHEATLGKHIIKKLTKKHYTGWGRLSKELIQGIRDKQSNKTILDYLINDDDFPHHRNRNFMQLINDDSL | |
| | SFKKEIKKAQMITDTENLEEIVKELTGSPAIKKGILQSLKIVDEIVGIMGYEPANIVVEMARENQTTGRGLKSSRPRLKALEESLKDFGSQLLKEYPTDNSSLQKDRLYLYYLQNGRDM | |
| | YTGAPLDIHRLSDYDIDHIIPRSFTTDNSIDNKVLVSSKENRLKKDDVPSEKVVKKMRSFWYDLYSSKLISKRKLDNLTKIKLTEEDKAGFIKRQLVETRQITKHVAGILHHRFNKAED | |
| | TNEPIRKVRIITLKSALVSQFRNRFGIYKVREINEYHHAHDAYLNGVVALALLKKYPQLAPEFVYGEYLKFNAHKANKATVKKEFYSNIMKFFESDTPVCDENGEIFWDKSKSIAQVKK | |
| | VINHHHMNIVKKTEIQKGGFSEETVEPKKDSSKLLPRKNNWDPAKYGGLGSPNVAYTVAFTYEKGKARKRTNALEGITIMEREAFEQSPVLFLKNKGYEQAEIEMKLPKYALFELENGR | |
| | KRMVASNKEAQKANSFLLPEHLVTLLYHAKQYDEISHKESFDYVNEHHKEFSEVFARVLEFAGKYTLAEKNIEKLEKIYKENQTDDLAKLASSFVNLMQFNAMGAPADFKFFDVTIPRK | |
| | RYTSLTEIWQSTIIHQSITGLYETRIRMGK | |
| 220 | MKKEYTIGLDIGTNSVGWSVLTDDYRLVSKKMKVAGNTEKSSTKKNFWGVRLFDEGQTAEARRSKRTARRRLARRRQRILELQKIFAPEILKIDEHFFARLNESFLVLDEKKQSRHPVF | WP_002335161.1 |
| | ATIKQEKSYHQTYPTIYHLRQALADSSEKADIRLVYLAMAHLLKYRGHFLIEGELNTENSSVTETFRQFLSTYNQQFSEADDKQTEKLDEAVDCSFVFTEKMSKTKKAETLLKYFPHEK | [Enterococcus |
| | SNGYLSQFIKLMVGNQGNFKNVFGLEEEAKLQFSKETYEEDLEELLEKIGDDYIDLFVQAKNVYDAVLLSEILSDSTKNTRAKLSAGMIRRYDAHKEDLVLLKRFVKENLPKKYRAFFG | faecium] |
| | DNSVNGYAGYIEGHATQEDFYKFVKKELTGIRGSEVFLTKIEQENFLRKQRTFDNGVIPHQIHLTELRAIIANQKKHYPFLKEEQEKLESLLTFKIPYYVGPLAKKQENSPFAWLIRKS | |
| | EEKIKPWNLPEIVDMEGSAVRFIERMINTDMYMPHNKVLPKNSLLYQKFSIYNELTKVRYQDERGQMNYFSSIEKKEIFHELFEKNRKVTKKDLQEFLYLKYDIKHAELSGIEKAFNAS | |
| | YTTYHDFLTMSENKREMKQWLEDPELASMFEEIIKTLTVFEDREMIKTRLSHHEATLGKHIIKKLTKKHYTGWGRLSKELIQGIRDKQSNKTILDYLINDDDFPHHRNRNFMQLINDDS | |
| | LSFKKEIKKAQMITDTENLEEIVKELTGSPAIKKGILQSLKIVDEIVGIMGYEPANIVVEMARENQTTGRGLKSSRPRLKALEESLKDFGSQLLKEYPTDNSSLQKDRLYLYYLQNGRD | |
| | MYTGAPLDIHRLSDYDIDHIIPRSFTTDNSIDNKVLVSSKENRLKKDDVPSEKVVKKMRSFWYDLYSSKLISKRKLDNLTKIKLTEEDKAGFIKRQLVETRQITKHVAGILHHRFNKAE | |
| | DTNEPIRKVRIITLKSALVSQFRNRFGIYKVREINEYHHAHDAYLNGVVALALLKKYPQLAPEFVYGEYLKFNAHKANKATVKKEFYSNIMKFFESDTPVCDENGEIFWDKSKSIAQVK | |
| | KVINHHHMNIVKKTEIQKGGFSKETVEPKKDSSKLLPRKNNWDPAKYGGLGSPNVAYTVAFTYEKGKARKRTNALEGITIMEREAFEQSPVLFLKNKGYEQAEIEMKLPKYALFELENG | |
| | RKRMVASNKEAQKANSFLLPEHLVTLLYHAKQYDEISHKESFDYVNEHHKEFSEVFARVLEFAGKYTLAEKNIEKLEKIYKENQTDDLAKLASSFVNLMQFNAMGAPADFKFFDVTIPR | |
| | KRYTSLTEIWQSTIIHQSITGLYETRIRMGK | |
| 221 | MKKEYTIGLDIGTNSVGWSVLTDDYRLVSKKMKVAGNTEKSSTKKNFWGVRLFDEGQTAEARRSKRTARRRLARRRQRILELQKIFAPEILKIDEHFFARLNESFLVLDEKKQSRHPVF | WP_002345439.1 |
| | ATIKQEKSYHQTYPTIYHLRQALADSSEKADIRLVYLAMAHLLKYRGHFLIEGELNTENSSVTETFRQFLSTYNQQFSEADDKQTEKLDEAVDCSFVFTEKMSKTKKAETLLKYFPHEK | [Enterococcus |
| | SNGYLSQFIKLMVGNQGNFKNVFGLEEEAKLQFSKETYEEDLEELLEKIGDDYIDLFVQAKNVYDAVLLSEILSDSTKNTRAKLSAGMIRRYDAHKEDLVLLKRFVKENLPKKYRAFFG | faecium] |
| | DNSVNGYAGYIEGHATQEDFYKFVKKELTGIRGSEVFLTKIEQENFLRKQRTFDNGVIPHQIHLTELRAIIANQKKHYPFLKEEQEKLESLLTFKIPYYVGPLAKKQENSPFAWLIRKS | |
| | EEKIKPWNLPEIVDMEGSAVRFIERMINTDMYIPHNKVLPKNSLLYQKFSIYNELTKVRYQDERGQMNYFSSIEKKEIFHELFEKNRKVTKKDLQEFLYLKYDIKHAELSGIEKAFNAS | |
| | YTTYHDFLTMSENKREMKQWLEDPELASMFEEIIKTLTVFEDREMIKTRLSHHEATLGKHIIKKLTKKHYTGWGRLSKELIQGIRDKQSNKTILDYLINDDDFPHHRNRNCMQLINDDS | |
| | LSFKKEIKKAQMITDTENLEEIVKELTGSPAIKKGILQSLKIVDEIVGIMGYEPANIVVEMARENQTTGRGLKSSRPRLKALEESLKDFGSQLLKEYPTDNSSLQKDRLYLYYLQNGRD | |
| | MYTGAPLDIHRLSDYDIDHIIPRSFTTDNSIDNKVLVSSKENRLKKDDVPSEKVVKKMRSFWYDLYSSKLISKRKLDNLTKIKLTEEDKAGFIKRQLVETRQITKHVAGILHHRFNKAE | |
| | DTNEPIRKVRIITLKSALVSQFRNRFGIYKVREINEYHHAHDAYLNGVVALALLKKYPQLAPEFVYGEYLKFNAHKANKATVKKEFYSNIMKFFESDTPVCDENGEIFWDKSKSIAQVK | |
| | KVINHHHMNIVKKTEIQKGGFSKETVEPKKDSSKLLPRKNNWDPTKYGGLGSPNVAYTVAFTYEKGKARKRTNALEGITIMEREAFEQSPVLFLKNKGYEQAEIEMKLPKYALFELENG | |
| | RKRMVASNKEAQKANSFLLPEHLVTLLYHAKQYDEISHKESFDYVNEHHKEFSEVFARVLEFAGKYTLAEKNIEKLEKIYKENQTDDLAKLASSFVNLMQFNAMGAPADFKFFDVTIPR | |
| | KRYTSLTEIWQSTIIHQSITGLYETRIRMGK | |
| 222 | MKKEYTIGLDIGTNSVGWSVLTDDYRLVSKKMKVAGNTEKSSTKKNFWGVRLFDEGQTAEARRSKRTARRRLARRRQRILELQKIFAPEILKIDEHFFARLNESFLVLDEKKQSRHPVF | WP_047937432.1 |
| | ATIKQEKSYHQTYPTIYHLRQALADSSEKADIRLVYLAMAHLLKYRGHFLIEGELNTENSSVTETFRQFLSTYNQQFSEADDKQTEKLDEAVDCSFVFTEKMSKTKKAETLLKYFPHEK | [Enterococcus |
| | SNGYLSQFIKLMVGNQGNFKNVFGLEEEAKLQFSKETYEEDLEELLEKIGDDYIDLFVQAKNVYDAVLLSEILSDSTKNTRAKLSAGMIRRYDAHKEDLVLLKRFVKENLPKKYRAFFG | faecium] |
| | DNSVNGYAGYIEGHATQEDFYKFVKKELTGIRGSEVFLTKIEQENFLRKQRTFDNGVIPHQIHLTELRAIIANQKKHYPFLKEEQEKLESLLTFKIPYYVGPLAKKQENSPFAWLIRKS | |
| | EEKIKPWNLPEIVDMEGSAVRFIERMINTDMYMPHNKVLPKNSLLYQKFSIYNELTKVRYQDERGQMNYFSSIEKKEIFHELFEKNRKVTKKDLQEFLYLKYDIKHAELSGIEKAFNAS | |
| | YTTYHDFLTMSENKREMEQWLEDPELASMFEEIIKTLTVFEDREMIKTRLSHHEATLGKHIIKKLTKKHYTGWGRLSKELIQGIRDKQSNKTILDYLINDDDFPHHRNRNFMQLINDDS | |
| | LSFKKEIKKAQMITDTENLEEIVKELTGSPAIKKGILQSLKIVDEIVGIMGYEPANIVVEMARENQTTGRGLKSSRPRLKALEESLKDFGSQLLKEYPTDNSSLQKDRLYLYYLQNGRD | |
| | MYTGAPLDIHRLSDYDIDHIIPRSFTTDNSIDNKVLVSSKENRLKKDDVPSEKVVKKMRSFWYDLYSSKLISKRKLDNLTKIKLTEEDKAGFIKRQLVETRQITKHVAGILHHRFNKAE | |
| | DTNEPIRKVRIITLKSALVSQFRNRFGIYKVREINEYHHAHDAYLNGVIALALLKKYPQLAPEFVYGEYLKFNAHKANKATVKKEFYSNIMKFFESDTPVCDENGEIFWDKSKSIAQVK | |
| | KVINHHHMNIVKKTEIQKGGFSKETVEPKKDSSKLLPRKNNWDPAKYGGLGSPNVAYTVAFTYEKGKARKRTNALEGITIMEREAFEQSPVLFLKNKGYEQAEIEMKLPKYALFELENG | |
| | RKRMVASNKEAQKANSFLLPEHLVTLLYHAKQYDEISHKESFDYVNEHHKEFSEVFARVLEFAGKYTLAEKNIEKLEKIYKENQTDDLAKLASSFVNLMQFNAMGAPADFKFFDVTIPR | |
| | KRYTSLTEIWQSTIIHQSITGLYETRIRMGK | |
| 223 | MKKEYTIGLDIGTNSVGWSVLTDDYRLVSKKMKVAGNTEKSSTKKNFWGVRLFDEGQTAEARRSKRTARRRLARRRQRILELQKIFAPEILKIDEHFFARLNESFLVPDEKKQSRHPVF | WP_002312694.1 |
| | ATIKQEKSYHQTYPTIYHLRQALADSSEKADIRLVYLAMAHLLKYRGHFLIEGELNTENSSVTETFRQFLSTYNQQFSEAGDKQTEKLDEAVDCSFVFTEKMSKTKKAETLLKYFPHEK | [Enterococcus |
| | SNGYLSQFIKLMVGNQGNFKNVFGLEEEAKLQFSKETYEEDLEELLEKIGDDYIDLFVQAKNVYDAVLLSEILSDSTKNTRAKLSAGMIRRYDAHKEDLVLLKRFVKENLPKKYRAFFG | faecium] |
| | DNSVNGYAGYIEGHATQEAFYKFVKKELTGIRGSEVFLTKIEQENFLRKQRTFDNGVIPHQIHLSELRAIIANQKKHYPFLKEEQEKLESLLTFKIPYYVGPLAKKQENSPFAWLIRKS | |
| | EEKIKPWNLPEIVDMEGSAVRFIERMINTDMYMPHNKVLPKNSLLYQKFSIYNELTKVRYQDERGQMNYFSSIEKKEIFHELFEKNRKVTKKDLQEFLYLKYDIKHAELSGIEKAFNAS | |
| | YTTYHDFLTMSENKREMKQWLEDPELASMFEEIIKTLTVFEDREMIKTRLSHHEATLGKHIIKKLTKKHYTGWGRLSKELIQGIRDKQSNKTILDYLINDDDFPHHRNRNFMQLINDDS | |
| | LSFKKEIKKAQMITDTENLEEIVKELTGSPAIKKGILQSLKIVDEIVGIMGYEPANIVVEMARENQTTGRGLKSSRPRLKALEESLKDFGSQLLKEYPTDNSSLQKDRLYLYYLQNGRD | |
| | MYTGAPLDIHRLSDYDIDHIIPRSFTTDNSIDNKVLVSSKENRLKKDDVPSEKVVKKMRSFWYDLYSSKLISKRKLDNLTKIKLTEEDKAGFIKRQLVETRQITKHVAGILHHRFNKAE | |
| | DTNDPIRKVRIITLKSALVSQFRNRFGIYKVREINEYHHAHDAYLNGVVALALLKKYPQLAPEFVYGEYLKFNAHKANKATVKKEFYSNIMKFFESDTPVCDENGEIFWDKSKSIAQVK | |
| | KVINHHHMNIVKKTEIQKGGFSKETVEPKKDSSKLLPRKNNWDPAKYGGLGSPNVAYTVAFTYEKGKARKRTNALEGITIMEREAFEQSPVLFLKNKGYEQAEIEMKLPKYALFELENG | |
| | RKRMVASNKEAQKANSFLLPEHLVTLLYHAKQYDEISHKESFDYVNEHHKEFSEVFARVLEFAGKYTLAEKNIEKLEKIYKENQTDDLAKLASSFVNLMQFNAMGAPADFKFFDVTIPR | |
| | KRYTSLTEIWQSTIIHQSITGLYETRIRMGK | |
| 224 | MKKGYSIGLDIGTNSVGFAVITDDYKVPSKKMKVLGNTDKRFIKKNLIGALLFDEGTTAEARRLKRTARRRYTRRKNRLRYLQEIFSEEMSKVDSSFFHRLDDSFLIPEDKRESKYPIF | WP_045635197.1 |
| | ATLTEEKEYHKQFPTIYHLRKQLADSKEKTDLRLIYLALAHMIKYRGHFLYEEAFDIKNNDIQKIFNEFISIYDNTFEGSSLSGQNAQVEAIFTDKISKSAKRERVLKLFPDEKSTGLF | [Streptococcus |
| | SEFLKLIVGNQADFKKHFDLEDKAPLQFSKDTYDEDLENLLGQIGDDFTDLFVSAKKLYDAILLSGILTVTDPSTKAPLSASMIERYENHQNDLAALKQFIKNNLPEKYDEVFSDQSKD | mitis] |
| | GYAGYIDGKTTQETFYKYIKNLLSKFEGTDYFLDKIEREDFLRKQRTFDNGSIPHQIHLQEMNAILRRQGEYYPFLKDNKEKIEKILTFRIPYYVGPLARGNRDFAWLTRNSDEAIRPW | |
| | NFEEIVDKASSAEDFINKMTNYDLYLPEEKVLPKHSLLYETFAVYNELTKVKFIAEGLRDYQFLDSGQKKQIVNQLFKENRKVTEKDIIHYLHNVDGYDGIELKGIEKQFNASLSTYHD | |
| | LLKIIKDKEFMDDAKNEAILENIVHTLTIFEDREMIKQRLAQYDSLFDEKVIKALTRRHYTGWGKLSAKLINGICDKQTGNTILDYLIDDGKINRNFMQLINDDGLSFKEIIQKAQVIG | |
| | KTDDVKQVVQELSGSPAIKKGILQSIKIVDELVKVMGHAPESIVIEMARENQTTARGKKNSQQRYKRIEDSLKILASGLDSNILKENPTDNNQLQNDRLFLYYLQNGKDMYTGEALDIN | |
| | QLSSYDIDHIIPQAFIKDDSLDNRVLTSSKDNRGKSDNVPSIEVVQKRKAFWQQLLDSKLISERKFNNLTKAERGGLDERDKVGFIKRQLVETRQITKHVAQILDARYNTEVNEKDKKN | |
| | RTVKIITLKSNLVSNFRKEFRLYKVREINDYHHAHDAYLNAVVAKAILKKYPKLEPEFVYGEYQKYDLKRYISRSKDPKEVEKATEKYFFYSNLLNFFKEEVHYADGTIVKRENIEYSK | |
| | DTGEIAWNKEKDFAIIKKVLSLPQVNIVKKREVQTGGFSKESILPKGNSDKLIPRKTKDILLDTTKYGGFDSPVIAYSILLIADIEKGKAKKLKTVKTLVGITIMEKAAFEENPITFLE | |
| | NKGYHNVRKENILCLPKYSLFELENGRRRLLASAKELQKGNEIVLPVYLTTLLYHSKNVHKLDEPGHLEYIQKHRNEFKDLLNLVSEFSQKYVLADANLEKIKSLYADNEQADIEILAN | |
| | SFINLLTFTALGAPAAFKFFGKDIDRKRYTTVSEILNATLIHQSITGLYETWIDLSKLGED | |
| 225 | MKKGYSIGLDIGTNSVGFAVITDDYKVPSKKMKVLGNTDKRFIKKNLIGALLFDEGTTAEARRLKRTARRRYTRRKNRLRYLQEIFSEEMSKVDSSFFHRLDDSFLIPEDKRESKYPIF | WP_045635197.1 |
| | ATLTEEKEYHKQFPTIYHLRKQLADSKEKTDLRLIYLALAHMIKYRGHFLYEEAFDIKNNDIQKIFNEFISIYDNTFEGSSLSGQNAQVEAIFTDKISKSAKRERVLKLFPDEKSTGLF | [Streptococcus |
| | SEFLKLIVGNQADFKKHFDLEDKAPLQFSKDTYDEDLENLLGQIGDDFTDLFVSAKKLYDAILLSGILTVTDPSTKAPLSASMIERYENHQNDLAALKQFIKNNLPEKYDEVFSDQSKD | mitis] |
| | GYAGYIDGKTTQETFYKYIKNLLSKFEGTDYFLDKIEREDFLRKQRTFDNGSIPHQIHLQEMNAILRRQGEYYPFLKDNKEKIEKILTFRIPYYVGPLARGNRDFAWLTRNSDEAIRPW | |
| | NFEEIVDKASSAEDFINKMTNYDLYLPEEKVLPKHSLLYETFAVYNELTKVKFIAEGLRDYQFLDSGQKKQIVNQLFKENRKVTEKDIIHYLHNVDGYDGIELKGIEKQFNASLSTYHD | |
| | LLKIIKDKEFMDDAKNEAILENIVHTLTIFEDREMIKQRLAQYDSLFDEKVIKALTRRHYTGWGKLSAKLINGICDKQTGNTILDYLIDDGKINRNFMQLINDDGLSFKEIIQKAQVIG | |
| | KTDDVKQVVQELSGSPAIKKGILQSIKIVDELVKVMGHAPESIVIEMARENQTTARGKKNSQQRYKRIEDSLKILASGLDSNILKENPTDNNQLQNDRLFLYYLQNGKDMYTGEALDIN | |
| | QLSSYDIDHIIPQAFIKDDSLDNRVLTSSKDNRGKSDNVPSIEVVQKRKAFWQQLLDSKLISERKFNNLTKAERGGLDERDKVGFIKRQLVETRQITKHVAQILDARYNTEVNEKDKKN | |
| | RTVKIITLKSNLVSNFRKEFRLYKVREINDYHHAHDAYLNAVVAKAILKKYPKLEPEFVYGEYQKYDLKRYISRSKDPKEVEKATEKYFFYSNLLNFFKEEVHYADGTIVKRENIEYSK | |
| | DTGEIAWNKEKDFAIIKKVLSLPQVNIVKKREVQTGGFSKESILPKGNSDKLIPRKTKDILLDTTKYGGFDSPVIAYSILLIADIEKGKAKKLKTVKTLVGITIMEKAAFEENPITFLE | |
| | NKGYHNVRKENILCLPKYSLFELENGRRRLLASAKELQKGNEIVLPVYLTTLLYHSKNVHKLDEPGHLEYIQKHRNEFKDLLNLVSEFSQKYVLADANLEKIKSLYADNEQADIEILAN | |
| | SFINLLTFTALGAPAAFKFFGKDIDRKRYTTVSEILNATLIHQSITGLYETWIDLSKLGED | |
| 226 | MKKKYAIGIDIGTNSVGWSVVTDDYKVPSKKMKVFGNTEKRYIKKNLLGTLLFDEGNTAENRRLKRTARRRYTRRRNRILYLQEIFAEEINKIDDSFFQRLDDSFLIVEDKQGSKHPIF | WP_044680361.1 |
| | GTLQEEKEYHKQFPTIYHLRKQLADSSQKADIRLIYLALAHIIKYRGHFLFEGDLKSENKDVQHLFNDFVEMFDKTVEGSYLSENLPNVADVLVEKVSKSRRLENILHYFPNEKKNGLF | [Streptococcus |
| | GNFLALALGLQPNFKTNFELAEDAKIQFSKETYEEDLEELLGKIGDDYADLFIATKSLYDGILLAGILSTTDSTTKAPLSSSMVNRYEEHQKDLALLKNFIHQNLSDSYKEVFNDKLKD | suis] |
| | GYAGYIEGKTTQENFYRFIKKAIEKIEGSNYFIDKIDREDFLRKQRTFDNGSIPHQIHLQEMHAIIRRQAEFYPFLVENQDKIEKILTFRIPYYVGPLARGKSEFAWLNRKSDEKIRPW | |
| | NFDEMVDKETSAENFITRMTNYDQYLPDQKVLPKHSLLYEKFAVYNELTKVRYVTEQGKSFFFDANMKQEIFDGVFKVYRKVTKEKLMDFLGKEFDEFRIVDLLGLDKDNKSFNASLGT | |
| | YHDLKKIVSKDLLDNPENEDILENVVLTLTLFEDREMIRKRLEKYKDVLTEEQRKKLERRHYTGWGRLSAKLINGIRDKVTRKTILDYLIDDGTSNRNFMQLINDDTLSFVDEIRLAQG | |
| | SGEAEDYRAEVQNLAGSPAIKKGILQSLKIVDELIEVMGYDPEHIVVEMARENQFTNQGRRNSQQRYKKIENAIKNLDSNLNSKILKEYPTNNQALQNDRLFLYYLQNGKDMYTDEELD | |
| | IDQLSQYDIDHIIPQAFIKDDSLDNKVLTKSAKNRGKSDDVPSLEIVHKKKNFWKQLLDSQLISQRKFDNLTKAERGGLTNEDKARFIQRQLVETRQITKHVARILDTRFNTKLDEAGN | |
| | RIRDPKVNIITLKSNLVSQFRKDYQLYKVREINNYHHAHDAYLNAVVATALLKKYPQLAPEFVYGDYPKYNSYKSRKSATEKVLFYSNIMNFFRRVLVYSKTGEVRIRPVIEVNKETGE | |
| | IVWDKKSDFRTVRKVLSYPQVNVVKKVEMQTGGFSKESILQHGDSDKLIPRKTEKFYLDTKKYGGFDSPTIAYSVLLIADIEKGKAKKLKRVKELIGITIMERMAFEKNPIEFLEHKGY | |
| | KNILEKNIIKLPKYSLFELENGRRRLLASAKELQKGNEMILPPHLVTLLYHSSNIHKITEPIHLNYVNKNKHEFKELLRHISDFSTRYILAQDRLSKIEELYDKNDGDDISDLTSSFVN | |
| | LLTFTAIGAPAAFKFLGSVIDRKRYTSIAEILEATLIHQSVTGLYETRIDLSKLGGD | |
| 227 | MKKKYAIGIDIGTNSVGWSVVTDDYKVPSKKMKVFGNTEKRYIKKNLLGTLLFDEGNTAENRRLKRTARRRYTRRRNRILYLQEIFAEEINKIDDSFFQRLDDSFLIVEDKQGSKHPIF | WP_044676715.1 |
| | GTLQEEKEYHKQFPTIYHLRKQLADSSQKADIRLIYLALAHIIKYRGHFLFEGDLKSENKDVQHLFNDFVEMFDKTVEGSYLSENLPNVADVLVEKVSKSRRLENILHYFPNEKKNGLF | [Streptococcus |
| | GNFLTLALGLQPNFKTNFELAEDAKIQFSKETYEEDLEELLGKIGDDYADLFIATKSLYDGILLAGILSTTDSTTKAPLSSSMVNRYEEHQKDLALLKNFIHQNLSDSYKEVFNDKLKD | suis] |
| | GYAGYIEGKTTQENFYRFIKKAIEKIEGSNYFIDKIDREDFLRKQRTFDNGSIPHQIHLQEMHAIIRRQAEFYPFLVENQDKIEKILTFRIPYYVGPLARGKSEFAWLNRKSDEKIRPW | |
| | NFDEMVDKETSAENFITRMTNYDQYLPDQKVLPKHSLLYEKFAVYNELTKVRYVTEQGKSFFFDANMKQEIFDGVFKVYRKVTKEKLMDFLGKEFDEFRIVDLLGLDKDNKSFNASLGT | |
| | YHDLKKIVSKDLLDNPENEDILENVVLTLTLFEDREMIRKRLEKYKDVLTEEQRKKLERRHYTGWGRLSAKLINGIRDKVTRKTILDYLIDDGTSNRNFMQLINDDTLSFVDEIRLAQG | |
| | SGEAEDYRAEVQNLAGSPAIKKGILQSLKIVDELIEVMGYDPEHIVVEMARENQFTNQGRRNSQQRYKKIENAIKNLDSNLNSKILKEYPTNNQALQNDRLFLYYLQNGKDMYTDEELD | |
| | IDQLSQYDIDHIIPQAFIKDDSLDNKVLTKSAKNRGKSDDVPSLEIVHKKKNFWKQLLDSQLISQRKFDNLTKAERGGLTNEDKARFIQRQLVETRQITKHVARILDTRFNTKLDEAGN | |
| | RIRDPKVNIITLKSNLVSQFRKDYQLYKVREINNYHHAHDAYLNAVVATALLKKYPQLAPEFVYGDYPKYNSYKSRKSATEKVLFYSNIMNFFRRVLVYSKTGEVRIRPVIEVNKETGE | |
| | IVWDKKSDFRTVRKVLSYPQVNVVKKVEMQTGGFSKESILQHGDSDKLIPRKTEKFYLDTKKYGGFDSPTIAYSVLLIADIEKGKAKKLKRVKELIGITIMERMAFEKNPIEFLEHKGY | |
| | KNILEKNIIKLPKYSLFELENGRRRLLASAKELQKGNEMILPPHLVTLLYHSSNIHKITEPIHLNYVNKNKHEFKELLRHISDFSTRYILAQDRLSKIEELYDKNDGDDISDLTSSFVN | |
| | LLTFTAIGAPAAFKFLGSVIDRKRYTSIAEILEATLIHQSVTGLYETRIDLSKLGGD | |
| 228 | MKKKYAIGIDIGTNSVGWSVVTDDYKVPSKKMKVFGNTEKRYIKKNLLGTLLFDEGNTAENRRLKRTARRRYTRRRNRILYLQEIFAEEINKIDDSFFQRLDDSFLIVEDKQGSKHPIF | WP_044681799.1 |
| | GTLQEEKKYHKQFPTIYHLRKQLADSSQKADIRLIYLALAHIIKYRGHFLFEGDLKSENKDVQHLFNDFVEMFDKTVEGSYLSENLPNVADVLVEKVSKSRRLENILHYFPNEKKNGLF | [Streptococcus |
| | GNFLALALGLQPNFKTNFELAEDAKIQFSKETYEEDLEELLGKIGDDYADLFIATKSLYDGILLAGILSTTDSTTKAPLSSSMVNRYEEHKKDLALLKNFIHQNLSDSYKEVFNDKLKD | suis] |
| | GYAGYIEGKTTQENFYRFIKKAIEKIEGSDYFIDKIDREDFLRKQRTFDNGSIPHQIHLQEMHAIIRRQAEFYPFLVENQDKIEKILTFRIPYYVGPLARGKSEFAWLNRKSDEKIRPW | |
| | NFDEMVDKETSAENFITRMTNYDQYLPDQKVLPKHSLLYEKFAVYNELTKVKFIAEGMRDYQFLDSGQKKDIVKTLFKTKRKVTAKDIKAYLENSNGYAGVELKGLEEQFNASLPTYHD | |
| | LLKILRDKAFIDAEENQEILEDIVLTLTLFEDREMIRKRLEKYKDILTEEQRKKLERRHYTGWGRLSAKLINGILDKVTRKTILGYLIDDGTSNRNFMQLINDDTLSFVDEIRLAQGSG | |
| | EAEDYRAEVQNLAGSPAIKKGILQSLKIVDELIEVMGYDPEHIVVEMARENQFTNQGRRNSQQRYKKIENAIKNLDSNLNSKILKEYPTNNQALQNDRLFLYYLQNGKDMYTDEELDID | |
| | QLSQYDIDHIIPQAFIKDDSLDNKVLTKSAKNRGKSDDVPSLEIVHKKKNFWKQLLDSQLISQRKFDNLTKAERGGLTNEDKARFIQRQLVETRQITKHVARILDTRFNTKLDEAGNRI | |
| | RDPKVNIITLKSNLVSQFRKDYQLYKVREINNYHHAHDAYLNAVVATALLKKYPQLAPEFVYGDYPKYNSYKSRKSATEKVLFYSNIMNFFRRVLVYSKTGEVRIRPVIEVNKETGEIV | |
| | WDKKSDFKTVRKVLSYPQVNVVKKVEMQTGGFSKESILQHGDSDKLIPRKTEKFYLDTKKYGGFDSPTIAYSVLLIADIEKGKAKKLKRVKELIGITIMERMAFEKNPIEFLEHKGYKN | |
| | ILEKNIIKLPKYSLFELENGRRRLLASAKELQKGNEMILPPHLVTLLYHSSNIHKITEPIHLNYVNKNKHEFKELLRHISDFSTRYILAQDRLSKIEELYDKNDGDDISDLTSSFVNLL | |
| | TFTAIGAPAAFKFLGSVIDRKRYTSIAEILEATLIHQSVTGLYETRIDLSKLGGD | |
| 229 | MKKKYAIGIDIGTNSVGWSVVTDDYKVPSKKMKVFGNTEKRYIKKNLLGTLLFDEGNTAENRRLKRTARRRYTRRRNRILYLQEIFAEEINKIDDSFFQRLDDSFLIVEDKQGSKHPIF | WP_044674937.1 |
| | GTLQEEKKYHKQFPTIYHLRKQLADSSQKADIRLIYLALAHIIKYRGHFLFEGDLKSENKDVQHLFNDFVEMFDKTVEGSYLSENLPNVADVLVEKVSKSRRLENILHYFPNEKKNGLF | [Streptococcus |
| | GNFLALALGLQPNFKTNFELAEDAKIQFSKETYEEDLEELLGKIGDDYADLFIATKSLYDGILLAGILSTTDSTTKAPLSSSMVNRYEEHKKDLALLKNFIHQNLSDSYKEVFNDKLKD | suis] |
| | GYAGYIEGKTTQENFYRFIKKAIEKIEGSDYFIDKIDREDFLRKQRTFDNGSIPHQIHLQEMHAIIRRQAEFYPFLVENQDKIEKILTFRIPYYVGPLARGKSEFAWLNRKSDEKIRPW | |
| | NFDEMVDKETSAENFITRMTNYDQYLPDQKVLPKHSLLYEKFAVYNELTKVKFIAEGMRDYQFLDSGQKKDIVKTLFKTKRKVTAKDIKAYLENSNGYAGVELKGLEEQFNASLPTYHD | |
| | LLKILRDKAFIDAEENQEILEDIVLTLTLFEDREMIRKRLEKYKDILTEEQRKKLERRHYTGWGRLSAKLINGILDKVTRKTILGYLIDDGTSNRNFMQLINDDTLSFVDEIRLAQGSG | |
| | EAEDYRAEVQNLAGSPAIKKGILQSLKIVDELIEVMGYDPEHIVVEMARENQFTNQGRRNSQQRYKKIENAIKNLDSNLNSKILKEYPTNNQALQNDRLFLYYLQNGKDMYTDEELDID | |
| | QLSQYDIDHIIPQAFIKDDSLDNKVLTKSAKNRGKSDDVPSLEIVHKKKNFWKQLLDSQLISQRKFDNLTKAERGGLTNEDKARFIQRQLVETRQITKHVARILDTRFNTKLDEAGNRI | |
| | RDPKVNIITLKSNLVSQFRKDYQLYKVREINNYHHAHDAYLNAVVATALLKKYPQLAPEFVYGDYPKYNSYKSRKSATEKVLFYSNIMNFFRRVLVYSKTGEVRIRPVIEVNKETGEIV | |
| | WDKKSDFRTVRKVLSYPQVNVVKKVEMQTGGFSKESILQHGDSDKLIPRKTEKFYLDTKKYGGFDSPTIAYSVLLIADIEKGKAKKLKRVKELIGITIMERMAFEKNPIEFLEHKGYKN | |
| | ILEKNIIKLPKYSLFELENGRRRLLASAKELQKGNEMILPPHLVTLLYHSSNIHKITEPIHLNYVNKNKHEFKELLRHISDFSTRYILAQDRLSKIEELYDKNDGDDISDLTSSFVNLL | |
| | TFTAIGAPAAFKFLGSVIDRKRYTSIAEILEATLIHQSVTGLYETRIDLSKLGGD | |
| 230 | MKKPYSIGLDIGTNSVGWAVITDDYKVPSKKMKVLGNTDKHFIKKNLIGALLFDEGTTAEDRRLKRTSRRRYTRRKNRLRYLQEIFSEEISKLDSSFFHRLDDSFLVPEDKRGSKYPIF | WP_002906454.1 |
| | ATLEEEKEYHKKFPTIYHLRKHLADSKEKTDLRLIYLALAHMIKYRGHFLYEESFDIKNNDIQKIFNEFISIYDNTFEGSSLSGQNAQVEAIFTDKISKSTKRERVLKLFSDEKSTGLF | [Streptococcus |
| | SEFLKLIVGNQADFKKHFDLEEKAPLQFSKDTYDEDLENLLGQIGDGFADLFLVAKKLYDAILLSGILTVTDPSTKAPLSASMIERYENHQEDLAALKQFIKNNLSEKYAEVFSDQSKD | sanguinis] |
| | GYAGFIDGKTTQEAFYKYIKNLLSKLEGADYFLNKIEREDFLRKQRTFDNGSIPHQIHLQEMNAILRRQGEHYLFLKENREKIEKILAFRIPYYVGPLARGNRDFAWLTRNSDQAIRPW | |
| | NFEEVVDKASSAEDFINKMTNYDLYLPEEKVLPKHSLLYETFAVYNELTKVKFIAEGLRDYQFLDSGQKKQIVNQLFKDKRKVTEKDIIHYLHNVDGYDGIELKGIEKQFNASLSTYHD | |
| | LLKIIKDKEFMDNPKNGEILENIIHTLTIFEDREMIKQRLAQYDTLFDEKVIKALTRRHYTGWGKLSAKLINGIRDKQTGKTILEYLIDDGDCNRNFMQLINDDGLSFKEIIQKAQVVG | |
| | KTDDVKQVVQEIPGSPAIKKGILQSIKIVDELVKVMGHNPESIVIEMARENQTTAKGKKNSQQRYKRIEDALKNLAPGLDSNILKENPTDNIQLQNDRLFLYYLQNGKDMYTGKAIDIN | |
| | QLSNYDIDHIIPQAFIKDDSLDNRVLTSSKDNRGKSDNVPSIEVVQKRKAFWQQLLDSKLISERKFNNLTKAKRGGLDERDKVGFIKRQLVETRQITKHVAQLLDTRFNTEVNEENQKI | |
| | RTVKIITLKSNLVSNFRKEFGLYKVREINDYHHAHDAYLNAVVAKAILKKYPKLEPEFVYGDYQKYDLKRYILKSKASNTIDKATEKYFFYSNLLNFFKEKVRYADGTIKKRENIEYSN | |
| | DTGEIAWNKEKDFATIKKVLSLPQVNIVKKTEEQTVGQNGGLFDNNIVSKKKVVDASKLIPIKSSLSPEKYGGYARPTIAYSVLVIADIEKGKGKAKKLKRIKEIVGITIQDKKKFESN | |
| | PVTYLEECGYKNINSNLIIKLPKYSLFEFNDGQRRLLASSIELQKGNELILPYHLTALLYHAQRINKISEPIHKQYVEAHQNEFKELLTTIISLSKKYIQKPNVELLLQQAFDQADKDI | |
| | YQLSESFISLLKLTSFGAPGAFKFLGVEISQSSVRYKPNSQFLDTTLIHQSITGLYETRIDLSKLGED | |
| 231 | MKKPYSIGLDIGTNSVGWAVVMEDYKVPSKKMKVLGNTDKQSIKKNLIGALLFDSGETAVERRLNRTTSRRYDRRRNRIRYLQHIFAEEMNRADENFFHRLKESFFVEEDKTYSKYPIF | WP_018372492.1 |
| | GTLEEEKNYHKNYPTIYHLRKTLADTPDKMDIRLIYLALAHIIKYRGHFLIEGDLDIENIGIQDSFKSFIEEYNTQFGTKLDSTTKVEAIFTENSSKAKRVETILGLFPDETAAGNLDK | [Streptococcus |
| | FLKLMLGNQADFKKVFDLEEKITLQFSKDSYEEDLELLLSKIDEEYAALFDLAKKVYDAVLLSNILTVKEKNTKAPLSASMIKRYEEHKDDLKAFKRFFRERLPEKYETMFKDLTKPSY | massiliensis] |
| | AAYVSGLYKKDAKRGLVPTSKRVTEDDFYKFSKGLLIDVEGAEYFLEKIEREDFLRKQRTFDNGAIPNQVHVKELQATILNQSKYYPFLAENKEKIEKILTFRIPYYVGPLARGNSSFA | |
| | WLQRKSDEAIRPWNFEQVVDMETSASRFIERMTLHDLYLPDEKVLPRHSLIYEKYTVFNELTKVRFTPEGGKEVYFSKTDKENIFDSLFKRYRKVTKRKLKDFIEKELGYGYIDIDNIK | |
| | GVEEQFNASYTTYQDLLKIIGDKEFLDNEENKDLLEEIIYILTVFEDRKMIEKRLSELNIPFENKIIKKLARKKYTGWGNLSRKLIDGIRNRETNRTILGHLIDDGFSNRNLMQLINDD | |
| | GLDFKEIIRKAQTIENIDTNQALVSSLPGSPAIKKGILQSLNIVDEITAIMGYAPTNIVIEMARENQTTQKGRDNSAQRLKKIEDGIKLLGSDLLKQNPIQDNKDLQKEKLFLYYMQNG | |
| | IDLYTGQPLNCDPDSLAFYDVDHIVPRSYIKNDSFDNKVLTTSKGNRKKLDDVPAKEVVEKMENTWRRLHAAGLISDIKLSYLMKGELTEEDKAGFIRRQLVETRQITKHVARLLDEKL | |
| | NRKKNENGEKLRTTKIITLKSVFASRFRANFDLYKLRELNHYHHAHDAYLNAVVAQALLKVYPKFERELVYGSYVKESIFSRKISATERMRMYNNILKFISKDKKVDQETGEIVWDKKE | |
| | IENIVKKVIYSSPVNIVKKREEQSGALFKQSNMAVGYNNKLIPRKKDWSVDKYGGFIEPAESYSLAIFYTDINGKKPKKKSTIIAISRMEKKDYEKEPERFLAQKGFERVEKTIKLPKY | |
| | SLFEMEKGRRRLLASSGELQKGNQVLLPEHLIRLLSYAKKVDVLVKSKDDDYDLEEHRAEFAELLDCIKKFNDMYILASSNMSKIEEIYQKNIDAPIEEVARSFVALLNFTMMGAATDF | |
| | KFFGQIIPRKRYPSTTECLKSTLIHQSVTGLYETRIDLSKLGEN | |
| 232 | MKKPYSIGLDIGTNSVGWAVVTDDYKVPAKKMKVLGNTDKSHIEKNLLGALLFDSGNTAEDRRLKRTARRRYTRRRNRILYLQEIFSEEMGKVDDSFFHRLEDFFLVTEDKRGERHPIF | WP_002279025.1 |
| | GNLEEEVKYHENFPTIYHLRQYLADNPEKVDLRLVYLALAHIIKFRGHFLIEGKFDTRNNDVQRLFQEFLAVYDNTFENSSLQEQNVQVEEILTDKISKSAKKDRVLKLFPNEKSNGRF | [Streptococcus |
| | AEFLKLIVGNQADFKKHFELEEKAPLQFSKDTYEEELEVLLAQIGDNYAELFLSAKKLYDSILLSGILTADDSSTKAPLSASMIQRYNEHQMDLAQLKQFIRQKLSDKYNEVFSDVSKD | mutans] |
| | GYAGYIDGKTNQEAFYKYLKGLLNKIEGSGYFLDKIEREDFLRKQRTFDNGSIPHQIHLQEMRAIIRRQSEFYPFLADNQDRIEKILTFRIPYYVGPLARGKSDFAWLSRKSADKITPW | |
| | NFDEIVDKESSAEAFINRMTNYDLYLPNQKVLPKHSLLYEKFTVYNELTKVKYKTEQGETAFFDANMKQEIFDGVFKVYRKVTKDKLMDFLEKEFDEFRIVDLTGLDKENKAFNASYGT | |
| | YHDLRKILDKDFLDNSKNEKILEDIVLTLTLFEDREMIRKRLKNYSDLLTKEQLKKLERRHYTGWGRLSAELIHGIRNKESRKTILDYLIDDGNSNRNFMQLINDDALSFKEEIAKAQV | |
| | IGETDNLNQVVSDIAGSPAIKKGILQSLKIVDELVKIMGHQPENIVVEMARENQFTNQGRRNSQQRLKGLTDSIKEFGSQILKEHPVENSQLQNDRLFLYYLQNGRDMYTGEELDIDYL | |
| | SQYDIDHIIPQAFIKDNSIDNRVLTSSKENRGKSDDVPSKDVVRKMKPYWSKLLSAKLITQRKFDNLTKAERGGLTDDDKAGFIKRQLVETRQITKHVARILDERFNTETDENNKKIRQ | |
| | VKIVTLKSNLVSNFRKEFELYKVREINDYHHAHDAYLNAVIGKALLGVYPQLEPEFVYGDYPHFHGHEENKATAKKFFYSNIMNFFKKDDVRTDKNGEIIWKKDEHISNIKKVLSYPQV | |
| | NIVKKVEEQTGGFSKESILPKGNSDKLIPRKTKKFYWDTKKYGGFDSPIVAYSILVIADIEKGKSKKLKTVKALVGVTIMEKMTFERDPVAFLERKGYRNVQEENIIKLPKYSLFKLEN | |
| | GRKRLLASARELQKGNEIVLPNHLGTLLYHAKNIHKVDEPKHLDYVDKHKDEFKELLDVVSNFSKKYTLAEGNLEKIKELYAQNNGEDLKELASSFINLLTFTAIGAPATFKFFDKNID | |
| | RKRYTSTTEILNATLIHQSITGLYETRIDLSKLGGD | |
| 233 | MKKPYSIGLDIGTNSVGWAVVTDDYKVPAKKMKVLGNTDKSHIEKNLLGALLFDSGNTAEDRRLKRTARRRYTRRRNRILYLQEIFSEEMGKVDDSFFHRLEDSFLVTEDKRGERHPIF | WP_019313659.1 |
| | GNLEEEVKYHENFPTIYHLRQYLADNPEKVDLRLVYLALAHIIKFRGHFLIEGKFDTRNNDVQRLFQEFLAVYDNTFENSSLQEQNVQVEEILTDKISKSAKKDRVLKLFPNEKSNGRF | [Streptococcus |
| | AEFLKLIIGNQADFKKHFELEEKAPLQFSKDTYEEELEVLLAQIGDNYAELFLSAKKLYDSILLSGILTVTDVGTQAPLSASMIQRYNEHQMDLAQLKQFIRQKLSDKYNEVFSDVSKD | mutans] |
| | GYAGYIDGKTNQEAFYKYLKGLLNKIEGSGYFLDKIEREDFLRKQRTFDNGSIPHQIHLQEMRAIIRRQAEFYPFLADNQDRIEKLLTFRIPYYVGPLARGKSDFAWLSRKSADKITPW | |
| | NFDEIVDKESSAEAFINRMTNYDLYLPNQKVLPKHSLLYEKFTVYNELTKVKYKTEQGKTAFFDANMKQEIFDGVFKVYRKVTKDKLMDFLEKEFDEFRIVDLTGLDKENKVFNASYGT | |
| | YHDLCKILDKDFLDNSKNEKILEDIVLTLTLFEDREMIRKRLENYSDLLTKEQVKKLERRHYTGWGRLSAELIHGIRNKESRKTILDYLIDDGNSNRNFMQLINDDALSFKEEIAKAQV | |
| | IGETDNLNQVVSDIAGSPAIKKGILQSLKIVDELVKIMGHQPENIVVEMARENQFTNQGRRNSQQRLKGLTDSIKEFGSQILKEHPVENSQLQNDRLFLYYLQNGRDMYTGEELDIDYL | |
| | SQYDIDHIIPQAFIKDNSIDNRVLTSSKENRGKSDDVPSKDVVRKMKSYWSKLLSAKLITQRKFDNLTKAERGGLTDDDKAGFIKRQLVETRQITKHVARILDERFHTETDENNKKIRQ | |
| | VKIVTLKSNLVSNFRKEFELYKVREINDYHHAHDAYLNAVIGKALLGVYPQLEPEFVYGDYPHFHGHKENKATAKKFFYSNIMNFFKKDDVRTDKNGEIIWKKDEHISNIKKVLSYPQV | |
| | NIVKKVEEQTGGFSKESILPKGNSDKLIPRKTKKFYWDTKKYGGFDSPIVAYSILVIADIEKGKSKKLKTVKALVGVTIMEKMTFERDPVAFLERKGYRNVQEENIIKLPKYSLFKLEN | |
| | GRKRLLASARELQKGNEIVLPNHLGTLLYHAKNIHKVDEPKHLDYVDKHKDEFKELLDVVSNFSKKYTLAEGNLEKIKELYAQNNGEDLKELASSFINLLTFTAIGAPATFKFFDKNID | |
| | RKRYTSTTEILNATLIHQSITGLYETRIDLNKLGGD | |
| 234 | MKKPYSIGLDIGTNSVGWAVVTDDYKVPAKKMKVLGNTDKSHIEKNLLGALLFDSGNTAEDRRLKRTARRRYTRRRNRILYLQEIFSEEMGKVDDSFFHRLEDSFLVTEDKRGERHPIF | WP_002263549.1 |
| | GNLEEEVKYHENFPTIYHLRQYLADNPEKVDLRLVYLALAHIIKFRGHFLIEGKFDTRNNDVQRLFQEFLAVYDNTFENSSLQEQNVQVEEILTDKISKSAKKDRVLKLFPNEKSNGRF | [Streptococcus |
| | AEFLKLIVGNQADFKKHFELEEKAPLQFSKDTYEEELEVLLAQIGDNYAELFLSAKKLYDSILLSGILTVTDVGTKAPLSASMIQRYNEHQMDLAQLKQFIRQKLSDKYNEVFSDVSKD | mutans] |
| | GYAGYIDGKTNQEAFYKYLKGLLNKIEGSGYFLDKIEREDFLRKQRTFDNGSIPHQIHLQEMRAIIRRQAEFYPFLADNQDRIEKLLTFRIPYYVGPLARGKSDFAWLSRKSADKITPW | |
| | NFDEIVDKESSAEAFINRMTNYDLYLPNQKVLPKHSLLYEKFTVYNELTKVKYKTEQGKTAFFDANMKQEIFDGVFKVYRKVTKDKLMDFLEKEFDEFRIVDLTGLDKENKVFNASYGT | |
| | YHDLCKILDKDFLDNSKNEKILEDIVLTLTLFEDREMIRKRLENYSDLLTKEQVKKLERRHYTGWGRLSAELIHGIRNKESRKTILDYLIDDGNSNRNFMQLINDDALSFKEEIAKAQV | |
| | IGETDNLNQVVSDIAGSPAIKKGILQSLKIVDELVKIMGHQPENIVVEMARENQFTNQGRRNSQQRLKGLTDSIKEFGSQILKEHPVENSQLQNDRLFLYYLQNGRDMYTGEELDIDYL | |
| | SQYDIDHIIPQAFIKDNSIDNRVLTSSKENRGKSDDVPSKDVVRKMKSYWSKLLSAKLITQRKFDNLTKAERGGLTDDDKAGFIKRQLVETRQITKHVARILDERFNTETDENNKKIRQ | |
| | VKIVTLKSNLVSNFRKEFELYKVREINDYHHAHDAYLNAVIGKALLGVYPQLEPEFVYGDYPHFHGHKENKATAKKFFYSNIMNFFKKDDVRTDKNGEIIWKKDEHISNIKKVLSYPQV | |
| | NIVKKVEEQTGGFSKESILPKGNSDKLIPRKTKKFYWDTKKYGGFDSPIVAYSILVIADIEKGKSKKLKTVKALVGVTIMEKMTFERDPVAFLERKGYRNVQEENIIKLPKYSLFKLEN | |
| | GRKRLLASARELQKGNEIVLPNHLGTLLYHAKNIHKVDEPKHLDYVDKHKDEFKELLDVVSNFSKKYTLAEGNLEKIKELYAQNNGEDLKELASSFINLLTFTAIGAPATFKFFDKNID | |
| | RKRYTSTTEILNATLIHQSITGLYETRIDLNKLGGD | |
| 235 | MKKPYSIGLDIGTNSVGWAVVTDDYKVPAKKMKVLGNTDKSHIEKNLLGALLFDSGNTAEDRRLKRTARRRYTRRRNRILYLQEIFSEEMGKVDDSFFHRLEDSFLVTEDKRGERHPIF | WP_002263887.1 |
| | GNLEEEVKYHENFPTIYHLRQYLADNPEKVDLRLVYLALAHIIKFRGHFLIEGKFDTRNNDVQRLFQEFLAVYDNTFENSSLQEQNVQVEEILTDKISKSAKKDRVLKLFPNEKSNGRF | [Streptococcus |
| | AEFLKLIVGNQADFKKHFELEEKAPLQFSKDTYEEELEVLLAQIGDNYAELFLSAKKLYDSILLSGILTVTDVGTKAPLSASMIQRYNEHQMDLAQLKQFIRQKLSDKYNEVFSDVSKD | mutans] |
| | GYAGYIDGKTNQEAFYKYLKGLLNKIEGSGYFLDKIEREDFLRKQRTFDNGSIPHQIHLQEMRAIIRRQAEFYPFLADNQDRIEKLLTFRIPYYVGPLARGKSDFAWLSRKSADKITPW | |
| | NFDEIVDKESSAEAFINRMTNYDLYLPNQKVLPKHSLLYEKFTVYNELIKVKYKTEQGKTAFFDANMKQEIFDGVFKVYRKVTKDKLMDFLEKEFDEFRIVDLTGLDKENKVFNASYGT | |
| | YHDLCKILDKDFLDNSKNEKILEDIVLTLTLFEDREMIRKRLENYSDLLTKEQVKKLERRHYTGWGRLSAELIHGIRNKESRKTILDYLIDDGNSNRNFMQLINDDALSFKEEIAKAQV | |
| | IGETDNLNQVVSDIAGSPAIKKGILQSLKIVDELVKIMGHQPENIVVEMARENQFTNQGRRNSQQRLKGLTDSIKEFGSQILKEHPVENSQLQNDRLFLYYLQNGRDMYTGEELDIDYL | |
| | SQYDIDHIIPQAFIKDNSIDNRVLTSSKENRGKSDDVPSKDVVRKMKSYWSKLLSAKLITQRKFDNLTKAERGGLTDDDKAGFIKRQLVETRQITKHVARILDERFNTETDENNKKIRQ | |
| | VKIVTLKSNLVSNFRKEFELYKVREINDYHHAHDAYLNAVIGKALLGVYPQLEPEFVYGDYPHFHGHKENKATAKKFFYSNIMNFFKKDDVRTDKNGEIIWKKDEHISNIKKVLSYPQV | |
| | NIVKKVEEQTGGFSKESILPKGNSDKLIPRKTKKFYWDTKKYGGFDSPIVAYSILVIADIEKGKSKKLKTVKALVGVTIMEKMTFERDPVAFLERKGYRNVQEENIIKLPKYSLFKLEN | |
| | GRKRLLASARELQKGNEIVLPNHLGTLLYHAKNIHKVDEPKHLDYVDKHKDEFKELLDVVSNFSKKYTLAEGNLEKIKELYAQNNGEDLKELASSFINLLTFTAIGAPATFKFFDKNID | |
| | RKRYTSTTEILNATLIHQSITGLYETRIDLNKLGGD | |
| 236 | MKKPYSIGLDIGTNSVGWAVVTDDYKVPAKKMKVLGNTDKSHIEKNLLGALLFDSGNTAEDRRLKRTARRRYTRRRNRILYLQEIFSEEMGKVDDSFFHRLEDSFLVTEDKRGERHPIF | WP_019803776.1 |
| | GNLEEEVKYHENFPTIYHLRQYLADNPEKVDLRLVYLALAHIIKFRGHFLIEGKFDTRNNDVQRLFQEFLAVYDNTFENSSLQEQNVQVEEILTDKISKSAKKDRVLKLFPNEKSNGRF | [Streptococcus |
| | AEFLKLIVGNQADFKKHFELEEKVPLQFSKDTYEEELEVLLAQIGDNYAELFLSAKKLYDSILLSGILTVTDVGTKAPLSASMIQRYNEHQMDLAQLKQFIRQKLSDKYNEVFSDVSKD | mutans] |
| | GYAGYIDGKTNQEAFYKYLKGLLNKIEGSGYFLDKIEREDFLRKQRTFDNGSIPHQIHLQEMRAIIRRQAEFYPFLADNQDRIEKLLTFRIPYYVGPLARGKSDFAWLSRKSADKITPW | |
| | NFDEIVDKESSAEAFINRMTNYDLYLPNQKVLPKHSLLYEKFTVYNELTKVKYKTEQGKTAFFDANMKQEIFDGVFKVYRKVTKDKLMDFLEKEFDEFRIVDLTGLDKENKVFNASYGT | |
| | YHDLCKILDKDFLDNSKNEKILEDIVLTLTLFEDREMIRKRLENYSDLLTKEQVKKLERRHYTGWGRLSAELIHGIRNKESRKTILDYLIDDGNSNRNFMQLINDDALSFKEEIAKAQV | |
| | IGETDNLNQVVSDIAGSPAIKKGILQSLKIVDELVKIMGHQPENIVVEMARENQFTNQGRRNSQQRLKGLTDSIKEFGSQILKEHPVENSQLQNDRLFLYYLQNGRDMYTGEELDIDYL | |
| | SQYDIDHIIPQAFIKDNSIDNRVLTSSKENRGKSDDVPSKDVVRKMKSYWSKLLSAKLITQRKFDNLTKAERGGLTDDDKAGFIKRQLVETRQITKHVARILDERFNTETDENNKKIRQ | |
| | VKIVTLKSNLVSNFRKEFELYKVREINDYHHAHDAYLNAVIGKALLGVYPQLEPEFVYGDYPHFHGHKENKATAKKFFYSNIMNFFKKDDVRTDKNGEIIWKKDEHISNIKKVLSYPQV | |
| | NIVKKVEEQTGGFSKESILPKGNSDKLIPRKTKKFYWDTKKYGGFDSPIVAYSILVIADIEKGKSKKLKTVKALVGVTIMEKMTFERDPVAFLERKGYRNVQEENIIKLPKYSLFKLEN | |
| | GRKRLLASARELQKGNEIVLPNHLGTLLYHAKNIHKVDEPKHLDYVDKHKDEFKELLDVVSNFSKKYTLAEGNLEKIKELYAQNNGEDLKELASSFINLLTFTAIGAPATFKFFDKNID | |
| | RKRYTSTTEILNATLIHQSITGLYETRIDLNKLGGD | |
| 237 | MKKPYSIGLDIGTNSVGWAVVTDDYKVPAKKMKVLGNTDKSHIEKNLLGALLFDSGNTAEDRRLKRTARRRYTRRRNRILYLQEIFSEEMGKVDDSFFHRLEDSFLVTEDKRGERHPIF | WP_024783594.1 |
| | GNLEEEVKYHENFPTIYHLRQYLADNPEKVDLRLVYLALAHIIKFRGHFLIEGKFDTRNNDVQRLFQEFLAVYDNTFENSSLQEQNVQVEEILTDKISKSAKKDRVLKLFPNEKSNGRF | [Streptococcus |
| | AEFLKLIVGNQADFKKHFELEEKAPLQFSKDTYEEELEVLLAQIGDNYAELFLSAKKLYDSILLSGILTVTDVGTKAPLSASMIQRYNEHQMDLAQLKQFIRQKLSDKYNEVFSDVSKD | mutans] |
| | GYAGYIDGKTNQEAFYKYLKGLLNKIEGSGYFLDKIEREDFLRKQRTFDNGSIPHQIHLQEMRAIIRRQAEFYPFLADNQDRIEKLLTFRIPYYVGPLARGKSDFAWLSRKSADKITPW | |
| | NFDEIVDKESSAEAFINRMTNYDLYLPNQKVLPKHSLLYEKFTVYNELTKVKYKTEQGKTAFFDANMKQEIFDGVFKVYRKVTKDKLMDFLEKEFDEFRIVDLTGLDKENKVFNASYGT | |
| | YHDLCKILDKDFLDNSKNEKILEDIVLTLTLFEDREMIRKRLENYSDLLTKEQVKKLERRHYTGWGRLSAELIHGIRNKESRKTILDYLIDDGNSNRNFMQLINDDALSFKEEIAKAQV | |
| | IGETDNLNQVVSDIAGSPAIKKGILQSLKIVDELVKIMGHQPENIVVEMARENQFTNQGRRNSQQRLKGLTDSIKEFGSQILKEHPVENSQLQNDRLFLYYLQNGRDMYTGEELDIDYL | |
| | SQYDIDHIIPQAFIKDNSIDNRVLTSSKENRGKSDDVPSKDVVRKMKSYWSKLLSAKLITQRKFDNLTKAERGGLTDDDKAGFIKRQLVETRQITKHVARILDERFNTETDENNKKIRQ | |
| | VKIVTLKSNLVSNFRKEFELYKVREINDYHHAHDAYLNAVIGKALLGVYPQLEPEFVYGDYPHFHGHKENKATAKKFFYSNIMNFFKKDDVRTDKNGEIIWKKDEHISNIKKVLSYPQV | |
| | NIVKKVEEQTGGFSKESILPKGNSDKLIPRKTKKFYWDTKKYGGFDSPIVAYSILVIADIEKSKSKKLKTVKALVGVTIMEKMTFERDPVAFLERKGYRNVQEENIIKLPKYSLFKLEN | |
| | GRKRLLASARELQKGNEIVLPNHLGTLLYHAKNIHKVDEPKHLDYVDKHKDEFKELLDVVSNFSKKYTLAEGNLEKIKELYAQNNGEDLKELASSFINLLTFTAIGAPATFKFFDKNID | |
| | RKRYTSTTEILNATLIHQSITGLYETRIDLNKLGGD | |
| 238 | MKKPYSIGLDIGTNSVGWAVVTDDYKVPAKKMKVLGNTDKSHIKKNLLGALLFDSGNTAADRRLKRTARRRYTRRRNRILYLQEIFAEEMNKVDDSFFHRLDESFLTDDDKNFDSHPIF | WP_024786433.1 |
| | GNKAEEDAYHQKFPTIYHLRKHLADSTEKADLRLVYLALAHMIKFRGHFLIEGELNAENTDVQKLFADFVGVYDRTFDDSHLSEITVDASSILTEKISKSRRLEKLINNYPKEKKNTLF | [Streptococcus |
| | GNLIALSLGLQPNFKTNFKLSEDAKLQFSKDTYEEDLEELLGKIGDDYADLFTLAKNLYDAILLSGILTADDSSTKAPLSASMIKRYAEHHEDLEKLKEFIKANKPELYHDIFKDETKN | mutans] |
| | GYAGYIENGVKQDEFYKYLKNTLSKIAGSDYFLDKIEREDFLRKQRTFDNGSIPHQIHLQEMHAILRRQGDYYPFLKENQDRIEKILTFRIPYYVGPLARKNSRFAWAEYHSDEAVTPW | |
| | NFDQVIDKESSAQAFIEHMTNNDLYLPNEKVLPKHSPLYEKYTVYNELTKIKYVTEIGEAKFFDANLKQEIFDGLFKHERKVTKKKLRTFLDKNFDEFRIVDIQGLDKETETFNASYAT | |
| | YQDLLKVIKDKVFMDNPENAEILENIVLTLTLFEDREMIKQRLAKYADVFDKKVIDQLARRHYTGWGRLSAKLLNGIRDKQSCKTIMDYLIDDAQSNRNLMQLITDDNLTFKDDIVKAQ | |
| | YVDNSDDLHQVVQSLAGSPAIKKGILQSLKIVDELVKVMGKEPEQIVVEMARENQTTAKGRRNSQQRYKRLKEAIKSLDRDLNHKILKEHPTDNQALQNNRLFLYYLQNGRDMYTGESL | |
| | DINRLSDYDIDHVIPQAFIKDNSIDNRVLTSSKANRGKSDDVPSEDVVNRMRPFWNKLLSSGLISQRKYNNLTKKELTLDDKAGFIKRQLVETRQITKHVARMLDERFNKEFDDNNKRI | |
| | RRVKIVTLKSNLVSSFRKEFELYKVREINDYHHAHDAYLNAVVVKALLVKYPKLEPEFVYGEYPKYNSYRERKTATQKMFFYSNIMNMFKSKVKLADDQIVERPMIEVNDETGEIAWDK | |
| | TKHITTVKKVLSYPQVNIVKKVEEQTIGQNGGLFDDNPKSPLEVIPSKLVPLKKALNPEKYGGYQKPTTAYPILLIVDTKQLIPISVMDKKRFEQNPVKFLKDKGYQQIEKNNFVKLPK | |
| | YTLVDIGNGIKRLWASSKEVHKGNQLVVSKKSQDLLYHAHHLDNDYSNEYVKNHYQQFDILFNEITSFSKKCKLGKEHIQKIEEAYSKERDSASIEELADGFIKLLGFTQLGATSPFSF | |
| | LGIKLNQKQYTGKKDYLLPCMEATLIHQSITGLYETRIDLSKLGGD | |
| 239 | MKKPYSIGLDIGTNSVGWAVVTDDYKVPAKKMKVLGNTDKSHIKKNLLGALLFDSGNTAADRRLKRTARRRYTRRRNRILYLQEIFAEEMSKVDDSFFHRLEDSFLVTEDKRGERHPIF | WP_002275430.1 |
| | GNLEEEVKYHENFPTIYHLRQYLADNPEKVDLRLVYLALAHIIKFRGHFLIEGKFDTRNNDVQRLFQEFLAVYDNTFENSSLQEQNVQVEEILTDKISKSAKKDRVLKLFPNEKSNGRF | [Streptococcus |
| | AEFLKLIVGNQADFKKHFELEEKAPLQFSKDTYEEELEVLLTQIGDNYAELFLSAKKLYDSILLSGILTVTDVSTKAPLSASMIQRYNEHQMDLAQLKQFIRQKLSDKYNEVFSDVSKD | mutans] |
| | GYAGYIDGKTNQEAFYKYLKGLLNKIEGSGYFLDKIEREDFLRKQRTFDNGSIPHQIHLQEMRAIIRRQAEFYPFLADNQDRIEKILTFRIPYYVGPLARGKSDFAWLSRKSADKITPW | |
| | NFDEIVDKESSAEAFINRMTNYDLYLPNQKVLPKHSLLYEKFTVYNELTKVKYKTEQGKTAFFDANMKQEIFDGVFKVYRKVTKDKLMDFLEKEFDEFRIVDLTGLDKENKAFNASYGT | |
| | YHDLRKILDKDFLDNSKNEKILEDIVLTLTLFEDREMIRKRLENYSDLLTKEQVKKLERRHYTGWGRLSAELIHGIRNKESRKTLLDYLIDDGNSNRNFMQLINDDALSFKEEIAKAQV | |
| | IGETDNLNQVVSDIAGSPAIKKGILQSLKIVDELVKIMGHQPENIVVEMARENQFTNQGRRNSQQRLKGLTDSIKEFGSQILKEHPVENSQLQNDRLFLYYLQNGRDMYTGEELDIDYL | |
| | SQYDIDHIIPQAFIKDNSIDNRVLTSSKENRGKSDDVPSKDVVRKMKPYWSKLLSAKLITQRKFDNLTKAERGGLTDDDKAGFIKRQLVETRQITKHVARILDERFNTETDENNKKIRQ | |
| | VKIVTLKSNLVSNFRKEFELYKVREINDYHHAHDAYLNAVIGKALLGVYPQLEPEFVYGDYPHFHGHEENKATAKKFFYSNIMNFFKKDDVRTDKNGEIIWKKDEHISNIKKVLSYPQV | |
| | NIVKKVEEQTGGFSKESILPKGNSDKLIPRKTKKFYWDTKKYGGFDSPIVAYSILVIADIEKGKSKKLKTVKALVGVTIMEKMTFERDPVAFLERKGYRNVQEENIIKLPKYSLFKLEN | |
| | GRKRLLASARELQKGNEIVLPNHLGTLLYHAKNIHKVDEPKHLDYVDKHKDEFKELLDVVSNFSKKYTLAEGNLEKIKELYAQNNGEDLKELSSSFINLLTFTAIGAPAAFKFFDKNID | |
| | RKRYTSTTEILNATLIHQSITGLYETRIDLSKLGGD | |
| 240 | MKKPYSIGLDIGTNSVGWAVVTDDYKVPAKKMKVLGNTDKSHIKKNLLGALLFDSGNTAADRRLKRTARRRYTRRRNRILYLQEIFAEEMSKVDDSFFHRLEDSFLVTEDKRGERHPIF | WP_002277364.1 |
| | GNLEEEVKYHENFPTIYHLRQYLADNPEKVDLRLVYLALAHIIKFRGHFLIEGKFDTRNNDVQRLFQEFLAVYDNTFENSSLQEQNVQVEEILTDKISKSAKKDRVLKLFPNEKSNGRF | [Streptococcus |
| | AEFLKLIVGNQADFKKHFELEEKAPLQFSKDTYEEELEVLLAQIGDNYAELFLSAKKLYDSILLSGILTVTDVSTKAPLSASMIQRYNEHQMDLAQLKQFIRQKLSDKYNEVFSDVSKD | mutans] |
| | GYAGYIDGKTNQEAFYKYLKGLLNKIEGSGYFLDKIEREDFLRKQRTFDNGSIPHQIHLQEMRAIIRRQAEFYPFLADNQDRIEKILTFRIPYYVGPLARGKSDFAWLSRKSADKITPW | |
| | NFDEIVDKESSAEAFINRMTNYDLYLPNQKVLPKHSLLYEKFTVYNELTKVKYKTEQGKTAFFDANMKQEIFDGVFKVYRKVTKDKLMDFLEKEFDEFRIVDLTGLDKENKAFNASYGT | |
| | YHDLRKILDKDFLDNSKNEKILEDIVLTLTLFEDREMIRKRLENYSDLLTKEQVKKLERRHYTGWGRLSAELIHGIRNKESRKTILDYLIDDGNSNRNFMQLINDDALSFKEEIAKAQV | |
| | IGETDNLNQVVSDIAGSPAIKKGILQSLKIVDELVKIMGHQPENIVVEMARENQFTNQGRRNSQQRLKGLTDSIKEFGSQILKEHPVEHSQLQNDRLFLYYLQNGRDMYTGEELDIDYL | |
| | SQYDIDHIIPQAFIKDNSIDNRVLTSSKENRGKSDDVPSKNVVRKMKSYWSKLLSAKLITQRKFDNLTKAERGGLTDDDKAGFIKRQLVETRQITKHVARILDERFHTETDENNKKIRQ | |
| | VKIVTLKSNLVSNFRKEFELYKVREINDYHHAHDAYLNAVIGKALLGVYPQLEPEFVYGDYPHFHGHKENKATAKKFFYSNIMNFFKKDDVRTDKNGEIIWKKDEHISNIKKVLSYPQV | |
| | NIVKKVEEQTGGFSKESILPKGNSDKLIPRKTKKFYWDTKKYGGFDSPIVAYSILVIADIEKGKSKKLKTVKALVGVTIMEKMTFERDPVAFLERKGYRNVQEENIIKLPKYSLFKLEN | |
| | GRKRLLASARELQKGNEIVLPNHLGTLLYHAKNIHKVDEPKHLDYVDKHKDEFKELLDVVSNFSKKYTLAEGNLEKIKELYAQNNGEDLKELASSFINLLTFTAIGAPATFKFFDKNID | |
| | RKRYTSTTEILNATLIHQSITGLYETRIDLSKLGGD | |
| 241 | MKKPYSIGLDIGTNSVGWAVVTDDYKVPAKKMKVLGNTDKSHIKKNLLGALLFDSGNTAADRRLKRTARRRYTRRRNRILYLQEIFAEEMSKVDDSFFHRLEDSFLVTEDKRGERHPIF | WP_002280230.1 |
| | GNLEEEVKYHENFPTIYHLRQYLADNPEKVDLRLVYLALAHIIKFRGHFLIEGKFDTRNNDVQRLFQEFLAVYDNTFENSSLQEQNVQVEEILTDKISKSAKKDRVLKLFPNEKSNGRF | [Streptococcus |
| | AEFLKLIVGNQADFKKHFELEEKAPLQFSKDTYEEELEVLLAQIGDNYAELFLSAKKLYDSILLSGILTVTDVSTKAPLSASMIQRYNEHQMDLAQLKQFIRQKLSDKYNEVFSDVSKD | mutans] |
| | GYAGYIDGKTNQEAFYKYLKGLLNKIEGSGYFLDKIEREDFLRKQRTFDNGSIPHQIHLQEMRAIIRRQAEFYPFLADNQDRIEKILTFRIPYYVGPLARGKSDFAWLSRKSADKITPW | |
| | NFDEIVDKESSAEAFINRMTNYDLYLPNQKVLPKHSLLYEKFTVYNELTKVKYKTEQGKTAFFDANMKQEIFDGVFKVYRKVTKDKLMDFLEKEFDEFRIVDLTGLDKENKVFNASYGT | |
| | YHDLCKILDKDFLDNSKNEKILEDIVLTLTLFEDREMIRKRLENYSDLLTKEQVKKLERRHYTGWGRLSAELIHGIRNKESRKTILDYLIDDGNSNRNFMQLINDDALSFKEEIAKAQV | |
| | IGETDNLNQVVSDIAGSPAIKKGILQSLKIVDELVKIMGHQPENIVVEMARENQFTKQGRRNSQQRLKGLTDSIKEFGSQILKEHPVENSQLQNDRLFLYYLQNGRDMYTGEELDIDYL | |
| | SQYDIDHIIPQAFIKDNSIDNRVLTSSKENRGKSDDVPSKDVVRKMKSYWSKLLSAKLITQRKFDNLTKAERGGLTDDDKAGFIKRQLVETRQITKHVARILDERFYTETDENNKKIRQ | |
| | VKIVTLKSNLVSNFRKEFELYKVREINDYHHAHDAYLNAVIGKALLGVYPQLEPEFVYGDYPHFHGHKENKATAKKFFYSNIMNFFKKDDVRTDKNGEIIWKKDEHISNIKKVLSYPQV | |
| | NIVKKVEEQTGGFSKESILPKGNSDKLIPRKTKKFYWDTKKYGGFDSPIVAYSILVIADIEKGKSKKLKTVKALVGVTIMEKMTFERDPVAFLERKGYRNVQEENIIKLPKYSLFKLEN | |
| | GRKRLLASARELQKGNEIVLPNHLGTLLYHAKNIHKVDEPKHLDYVDKHKDEFKELLDVVSNFSKKYTLAEGNLEKIKELYAQNNGEDLKELASSFINLLTFTAIGAPATFKFFDKNID | |
| | RKRYTSTTEILNATLIHQSITGLYETRIDLSKLGGD | |
| 242 | MKKPYSIGLDIGTNSVGWAVVTDDYKVPAKKMKVLGNTDKSHIKKNLLGALLFDSGNTAADRRLKRTARRRYTRRRNRILYLQEIFAEEMSKVDDSFFHRLEDSFLVTEDKRGERHPIF | WP_002281696.1 |
| | GNLEEEVKYHENFPTIYHLRQYLADNPEKVDLRLVYLALAHIIKFRGHFLIEGKFDTRNNDVQRLFQEFLAVYDNTFENSSLQEQNVQVEEILTDKISKSAKKDRVLKLFPNEKSNGRF | [Streptococcus |
| | AEFLKLIVGNQADFKKHFELEEKAPLQFSKDTYEEELEVLLAQIGDNYAELFLSAKKLYDSILLSGILTVTDVSTKAPLSASMIQRYNEHQMDLAQLKQFIRQKLSDKYNEVFSDVSKD | mutans] |
| | GYAGYIDGKTNQEAFYKYLKGLLNKIEGSGYFLDKIEREDFLRKQRTFDNGSIPHQIHLQEMRAIIRRQAEFYPFLADNQDRIEKILTFRIPYYVGPLARGKSDFAWLSRKSADKITPW | |
| | NFDEIVDKESSAEAFINRMTNYDLYLPNQKVLPKHSLLYEKFTVYNELTKVKYKTEQGKTAFFDANMKQEIFDGVFKVYRKVTKDKLMDFLEKEFDEFRIVDLTGLDKENKAFNASYGT | |
| | YHDLRKILDKDFLDNSKNEKILEDIVLTLTLFEDREMIRKRLENYSDLLTKEQVKKLERRHYTGWGRLSAELIHGIRNKESRKTILDYLIDDGNSNRNFMQLINDDALSFKEEIAKAQV | |
| | IGETDNLNQVVSDIAGSPAIKKGILQSLKIVDELVKIMGHQPENIVVEMARENQFTNQGRRNSQQRLKGLTDSIKEFGSQILKEHPVENSQLQNDRLFLYYLQNGRDMYTGEELDIDYL | |
| | SQYDIDHIIPQAFIKDNSIDNRVLTSSKENRGKSDDVPSKNVVRKMKSYWSKLLSAKLITQRKFDNLTKAERGGLTDDDKAGFIKRQLVETRQITKHVARILDERFHTETDENNKKIRQ | |
| | VKIVTLKSNLVSNFRKEFELYKVREINDYHHAHDAYLNAVIGKALLGVYPQLEPEFVYGDYPHFHGHKENKATAKKFFYSNIMNFFKKDDVRTDKNGEIIWKKDEHISNIKKVLSYPQV | |
| | NIVKKVEEQTGGFSKESILPKGNSDKLIPRKTKKFYWDTKKYGGFDSPIVAYSILVIADIEKGKSKKLKTVKALVGVTIMEKMTFERDPVAFLERKGYRNVQEENIIKLPKYSLFKLEN | |
| | GRKRLLASARELQKGNEIVLPNHLGTLLYHAKNIHKVDEPKHLDYVDKHKDEFKELLDVVSNFSKKYTLAEGNLEKIKELYAQNNGEDLKELSSSFINLLTFTAIGAPAAFKFFDKNID | |
| | RKRYTSTTEILNATLIHQSITGLYETRIDLSKLGGD | |
| 243 | MKKPYSIGLDIGTNSVGWAVVTDDYKVPAKKMKVLGNTDKSHIKKNLLGALLFDSGNTAADRRLKRTARRRYTRRRNRILYLQEIFAEEMSKVDDSFFHRLEDSFLVTEDKRGERHPIF | WP_012997688.1 |
| | GNLEEEVKYHENFPTIYHLRQYLADNPEKVDLRLVYLALAHIIKFRGHFLIEGKFDTRNNDVQRLFQEFLAVYDNTFENSSLQEQNVQVEEILTDKISKSAKKDRVLKLFPNEKSNGRF | [Streptococcus |
| | AEFLKLIVGNQADFKKHFELEEKAPLQFSKDTYEEELEVLLAQIGDNYAELFLSAKKLYDSILLSGILTVTDVSTKAPLSASMIQRYNEHQMDLAQLKQFIRQKLSDKYNEVFSDVSKD | mutans] |
| | GYAGYIDGKTNQEAFYKYLKGLLNKIEGSGYFLDKIEREDFLRKQRTFDNGSIPHQIHLQEMRAIIRRQAEFYPFLADNQDRIEKILTFRIPYYVGPLARGKSDFAWLSRKSADKITPW | |
| | NFDEIVDKESSAEAFINRMTNYDLYLPNQKVLPKHSLLYEKFTVYNELTKVKYKTEQGKTAFFDANMKQEIFDGVFKVYRKVTKDKLMDFLEKEFDEFRIVDLTGLDKENKAFNASYGT | |
| | YHDLRKILDKDFLDNSKNEKILEDIVLTLTLFEDREMIRKRLENYSDLLTKEQVKKLERRHYTGWGRLSAELIHGIRNKESRKTILDYLIDDGNSNRNFMQLINDDALSFKEEIAKAQV | |
| | IGETDNLNQVVSDIAGSPAIKKGILQSLKIVDELVKIMGHQPENIVVEMARENQFTNQGRRNSQQRLKGLTDSIKEFGSQILKEHPVKHSQLQNDRLFLYYLQNGRDMYTGEELDIDYL | |
| | SQYDIDHIIPQAFIKDNSIDNRVLTSSKENRGKSDDVPSKNVVRKMKSYWSKLLSAKLITQRKFDNLTKAERGGLTDDDKAGFIKRQLVETRQITKHVARILDERFHTETDENNKKIRQ | |
| | VKIVTLKSNLVSNFRKEFELYKVREINDYHHAHDAYLNAVIGKALLGVYPQLEPEFVYGDYPHFHGHKENKATAKKFFYSNIMNFFKKDDVRTDKNGEIIWKKDEHISNIKKVLSYPQV | |
| | NIVKKVEEQTGGFSKESILPKGNSDKLIPRKTKKFYWDTKKYGGFDSPIVAYSILVIADIEKGKSKKLKTVKALVGVTIMEKMTFERDPVAFLERKGYRNVQEENIIKLPKYSLFKLEN | |
| | GRKRLLASARELQKGNEIVLPNHLGTLLYHAKNIHKVDEPKHLDYVDKHKDEFKELLDVVSNFSKKYTLAEGNLEKIKELYAQNNGEDLKELASSFINLLTFTAIGAPATFKFFDKNID | |
| | RKRYTSTTEILNATLIHQSITGLYETRIDLSKLGGD | |
| 244 | MKKPYSIGLDIGTNSVGWAVVTDDYKVPAKKMKVLGNTDKSHIKKNLLGALLFDSGNTAADRRLKRTARRRYTRRRNRILYLQEIFAEEMSKVDDSFFHRLEDSFLVTEDKRGERHPIF | WP_019312892.1 |
| | GNLEEEVKYHENFPTIYHLRQYLADNPEKVDLRLVYLALAHIIKFRGHFLIEGKFDTRNNDVQRLFQEFLAVYDNTFENSSLQEQNVQVEEILTDKISKSAKKDRVLKLFPNEKSNGRF | [Streptococcus |
| | AEFLKLIVGNQADFKKHFELEEKAPLQFSKDTYEEELEVLLAQIGDNYAELFLSAKKLYDSILLSGILTVTDVSTKAPLSASMIQRYNEHQMDLAQLKQFIRQKLSDKYNEVFSDVSKD | mutans] |
| | GYAGYIDGKTNQEAFYKYLKGLLNKIEGSGYFLDKIEREDFLRKQRTFDNGSIPHQIHLQEMRAIIRRQAEFYPFLADNQDRIEKILTFRIPYYVGPLARGKSDFAWLSRKSADKITPW | |
| | NFDEIVDKESSAEAFINRMTNYDLYLPNQKVLPKHSLLYEKFTVYNELTKVKYKTEQGKTAFFDANMKQEIFDGVFKVYRKVTKDKLMDFLEKEFDEFRIVDLTGLDKENKAFNASYGT | |
| | YHDLRKILDKDFLDNSKNEKILEDIVLTLTLFEDREMIRKRLENYSDLLTKEQVKKLERRHYTGWGRLSAELIHGIRNKESRKTILDYLIDDGNSNRNFMQLINDDALSFKEEIAKAQV | |
| | IGETDNLNQVVSDIAGSPAIKKGILQSLKIVDELVKIMGHQPENIVVEMARENQFTNQGRRNSQQRLKGLTDSIKEFGSQILKEHPVENSQLQNDRLFLYYLQNGRDMYTGEELDIDYL | |
| | SQYDIDHIIPQAFIKDNSIDNRVLTSSKENRGKSDDVPSKNVVRKMKSYWSKLLSAKLITQRKFDNLTKAERGGLTDDDKAGFIKRQLVETRQITKHVARILDERFHTETDENNKKIRQ | |
| | VKIVTLKSNLVSNFRKEFELYKVREINDYHHAHDAYLNAVIGKALLGVYPQLEPEFVYGDYPHFHGHKENKATAKKFFYSNIMNFFKKDDVRTDKNGEIIWKKDEHISNIKKVLSYPQV | |
| | NIVKKVEEQTGGFSKESILPKGNSDKLIPRKTKKFYWDTKKYGGFDSPIVAYSILVIADIEKGKSKKLKTVKALVGVTIMEKMTFERDPVAFLERKGYRNVQEENIIKLPKYSLFKLEN | |
| | GRKRLLASARELQKGNEIVLPNHLGTLLYHAKNIHKVDEPKHLDYVDKHKDEFKELLDVVSNFSKKYTLAEGNLEKIKELYAQNNGEDLKELASSFINLLTFTAIGAPATFKFFDKNID | |
| | RKRYTSTTEILNATLIHQSITGLYETRIDLSKLGGD | |
| 245 | MKKPYSIGLDIGTNSVGWAVVTDDYKVPAKKMKVLGNTDKSHIKKNLLGALLFDSGNTAADRRLKRTARRRYTRRRNRILYLQEIFAEEMSKVDDSFFHRLEDSFLVTEDKRGERHPIF | WP_024784666.1 |
| | GNLEEEVKYHENFPTIYHLRQYLADNPEKVDLRLVYLALAHIIKFRGHFLIEGKFDTRNNDVQRLFQEFLAVYDNTFENSSLQEQNVQVEEILTDKISKSAKKDRVLKLFPNEKSNGRF | [Streptococcus |
| | AEFLKLIVGNQADFKKHFELEEKAPLQFSKDTYEEELEVLLAQIGDNYAELFLSAKKLYDSILLSGILTVTDVSTKAPLSASMIQRYNEHQMDLVQLKQFIRQKLSDKYNEVFSDVSKD | mutans] |
| | GYAGYIDGKTNQEAFYKYLKGLLNKIEGSGYFLDKIEREDFLRKQRTFDNGSIPHQIHLQEMRAIIRRQAEFYPFLADNQDRIEKILTFRIPYYVGPLARGKSDFAWLSRKSADKITPW | |
| | NFDEIVDKESSAEAFINRMTNYDLYLPNQKVLPKHSLLYEKFTVYNELTKVKYKTEQGKTAFFDANMKQEIFDGVFKVYRKVTKDKLMDFLEKEFDEFRIVDLTGLDKENKAFNASYGT | |
| | YHDLRKILDKDFLDNSKNEKILEDIVLTLTLFEDREMIRKRLENYSDLLTKEQVKKLERRHYTGWGRLSAELIHGIRNKESRKTILDYLIDDGNSNRNFMQLINDDALSFKEEIAKAQV | |
| | IGETDNLNQVVSDIAGSPAIKKGILQSLKIVDELVKIMGHQPENIVVEMARENQFTNQGRRNSQQRLKGLTDSIKEFGSQILKEHPVEHSQLQNDRLFLYYLQNGRDMYTGEELDIDYL | |
| | SQYDIDHIIPQAFIKDNSIDNRVLTSSKENRGKSDDVPSKNVVRKMKSYWSKLLSAKLITQRKFDNLTKAERGGLTDDDKAGFIKRQLVETRQITKHVARILDERFHTETDENNKKIRQ | |
| | VKIVTLKSNLVSNFRKEFELYKVREINDYHHAHDAYLNAVIGKALLGVYPQLEPEFVYGDYPHFHGHKENKATAKKFFYSNIMNFFKKDDVRTDKNGEIIWKKDEHISNIKKVLSYPQV | |
| | NIVKKVEEQTGGFSKESILPKGNSDKLIPRKTKKFYWDTKKYGGFDSPIVAYSILVIADIEKGKSKKLKTVKALVGVTIMEKMTFERDPVAFLERKGYRNVQEENIIKLPKYSLFKLEN | |
| | GRKRLLASARELQKGNEIVLPNHLGTLLYHAKNIHKVDEPKHLDYVDKHKDEFKELLDVVSNFSKKYTLAEGNLEKIKELYAQNNGEDLKELASSFINLLTFTAIGAPATFKFFDKNID | |
| | RKRYTSTTEILNATLIHQSITGLYETRIDLSKLGGD | |
| 246 | MKKPYSIGLDIGTNSVGWAVVTDDYKVPAKKMKVLGNTDKSHIKKNLLGALLFDSGNTAEDRRLKRTARRRYTRRRNRILYLQEIFAEEMMQVDESFFQRLDDSFLVEEDKRGSRYPIF | WP_002304487.1 |
| | GTLKEEKKYHKEFKTIYHLREKLANSTEKADLRLVYLSLAHMIKFRGHFLIEGQLKAENTNVQALFKDFVEVYDKTVEESHLSEMTVDALSILTEKVSKSRRLENLVECYPTEKKNTLF | [Streptococcus |
| | GNLIALSLGLQPNFKTNFQLSEDAKLQFSKDTYEEDLEGLLGEIGDEYADLFASAKNLYDAILLSGILAVDDNTTKAPLSASMVKRYKEHKEELAAFKRFIKEKLPKKYEEIFKDDTKN | mutans] |
| | GYAGYVGADKKLRKRSGKLATEEEFYKYVKGILNKVEGADVWLDKIDREDFLRKQRTFDNGSIPHQIHLQEMHAILRRQGEHYPFLKENQDKIEKILTFRIPYYVGPLVRKGSRFAWAE | |
| | YKADEKITPWNFDDILDKEKSAEKFITRMTLNDLYLPEEKVLPKHSLLYETFTVYNELTKVKYVNEQGEAKFFDANMKQEIFDHVFKENRKVTKDKLLNYLNKEFEEFRIVNLTGLDKE | |
| | NKVFNSSLGTYHDLRKILNKSFLDNKENEQIIEDIIQTLTLFEDREMIRQRLQKYSDIFTKAQLKKLERRHYTGWGRLSYKLINGIRDKQSNKTILGYLIDDGYSNRNFMQLINDDALS | |
| | FKEEIAKAQVIGEMDGLNQVVSDIAGSPAIKKGILQSLKIVDELVKVMGHNPANIVIEMARENQTTAKGRRSSQKRYKRLEEAIKNLDHDLNHKILKEHPTDNQALQNDRLFLYYLQNG | |
| | RDMYTEDPLDINRLSDYDIDHIIPQAFIKDNSIDNRVLTRSDKNRGKSDDVPSEEVVHKMKPFWSKLLSAKLITQRKFDNLTKAERGGLTDDDKAGFIKRQLVETRQITKHVARILDER | |
| | FNTETDENNKKIRQVKIVTLKSNLVSNFRKEFELYKVREINDYHHAHDAYLNAVIGKALLGVYPQLEPEFVYGDYPHFHGHKENKATAKKFFYSNIMNFFKKGDVRTDKNGEIIWKKDE | |
| | HISNIKKVLSYPQVNIVKKVEEQTGGFSKESILPKGNSDKLIPRKTKKFYWDTKKYGGFDSPIVAYSILVIADIEKGKSKKLKTVKALVGVTIMEKMTFERDPVAFLERKGYRNVQEEN | |
| | IIKLPKYSLFKLENGRKRLLASARELQKGNEIVLPNHLETLLYHAKNIHKVDEPKHLDYVDKHKDEFKELLDVVSNFSKKYTLAEGNLEKIKELYAQNNGEDLKELASSFINLLTFTAI | |
| | GAPAAFKFFDKNIDRKRYTSTTEILNATLIHQSITGLYETRIDLNKLGGD | |
| 247 | MKKPYSIGLDIGTNSVGWAVVTDDYKVPAKKMKVLGNTDKSHIKKNLLGALLFDSGNTAEDRRLKRTARRRYTRRRNRILYLQEIFAEEMSKVDDSFFHRLDESFLTDDDKNFDSHPIF | WP_002282247.1 |
| | GNKAEEDAYHQKFPTIYHLRKHLADSTEKADLRLVYLALAHMIKFRGHFLIEGELNAENTDVQKLFADFVGVYDRTFDDSHLSEITVDASSILTEKISKSRRLEKLINNYPKEKKNTLF | [Streptococcus |
| | GNLIALSLGLQPNFKTNFKLSEDAKLQFSKDTYEEDLEELLGKIGDDYADLFTLAKNLYDAILLSGILTADDSSTKAPLSASMIKRYAEHHEDLEKLKEFIKANKPELYHDIFKDETKN | mutans] |
| | GYAGYIENGVKQDEFYKYLKNTLSKITGSDYFLDQIEREDFLRKQRTFDNGSIPHQIHLQEMHAILRRQGDYYPFLKENQDRIEKILTFRIPYYVGPLARKNSRFAWAEYHSDEAVTPW | |
| | NFDQVIDKESSAQAFIEHMTNNDLYLPNEKVLPKHSPLYEKYTVYNELTKIKYVTEIGEAKFFDANLKQEIFDGLFKHERKVTKKKLRTFLDKNFDEFRIVDIQGLDKETETFNASYAT | |
| | YQDLLKVIKDKVFMDNPENAEILENIVLTLTLFEDREMIKQRLAKYADVFDKKVIDQLARRHYTGWGRLSAKLLNGIRDKQSCKTIMDYLIDDAQSNRNLMQLITDDNLTFKDDIVKAQ | |
| | YVDNSDDLHQVVQSLAGSPAIKKGILQSLKIVDELVKVMGKEPEQIVVEMARENQTTAKGRRNSQQRYKRLKEAIKSLDRDLNHKILKEHPTDNQALQNNRLFLYYLQNGRDMYTGESL | |
| | DINRLSDYDIDHVIPQAFIKDNSIDNRVLTSSKANRGKSDDVPSEDVVNRMRPFWNKLLSSGLISQRKYNNLTKKELTLDDKAGFIKRQLVETRQITKHVARMLDERFNKEFDDNNKRI | |
| | RRVKIVTLKSNLVSSFRKEFELYKVREINDYHHAHDAYLNAVVVKALLVKYPKLEPEFVYGEYPKYNSYRERKTATQKMFFYSNIMNMFKSKVKLADDQIVERPMIEVNDETGEIAWDK | |
| | TKHITTVKKVLSYPQVNIVKKVEEQTIGQNGGLFDDNPKSPLEVIPSKLVPLKKALNPEKYGGYQKPTTAYPILLIVDTKQLIPISVMDKKRFEQNPVKFLKDKGYQQIEKNNFVKLPK | |
| | YTLVDIGNGIKRLWASSKEVHKGNQLVVSKKSQDLLYHAHHLDNDYSNEYVKNHYQQFDILFNEITSFSKKCKLGKEHIQKIEEAYSKERDFASIEELADGFIKLLGFTQLGATSPFSF | |
| | LGIKLNQKQYTGKKDYLLPCMEATLIHQSITGLYETRIDLSKLGGD | |
| 248 | MKKPYSIGLDIGTNSVGWAVVTDDYKVPAKKMKVLGNTDKSHIKKNLLGALLFDSGNTAEDRRLKRTARRRYTRRRNRILYLQEIFAEEMSKVDDSFFHRLDESFLTDDDKNFDSHPIF | WP_024784288.1 |
| | GNKAEEDAYHQKFPTIYHLRKHLADSTEKADLRLVYLALAHMIKFRGHFLIEGELNAENTDVQKLFADFVGVYDRTFDDSHLSEITVDASSILTEKISKSRRLEKLINNYPKEKKNTLF | [Streptococcus |
| | GNLIALSLGLQPNFKTNFKLSEDAKLQFSKDTYEEDLEELLGKIGDDYADLFTLAKNLYDAILLSGILTADDSSTKAPLSASMIKRYAEHHEDLEKLKEFIKANKPELYHDIFKDETKN | mutans] |
| | GYAGYIENGVKQDEFYKYLKNTLSKITGSDYFLDQIEREDFLRKQRTFDNGSIPHQIHLQEMHAILRRQGDYYPFLKENQDRIEKILTFRIPYYVGPLARKNSRFAWAEYHSDEAVTPW | |
| | NFDQVIDKESSAQAFIEHMTNNDLYLPNEKVLPKHSPLYEKYTVYNELTKIKYVTEIGEAKFFDANLKQEIFDGLFKHERKVTKKKLRTFLDKNFDEFRIVDIQGLDKETETFNASYAT | |
| | YQDLLKVIKDKVFMDNPENAEILENIVLTLTLFEDREMIKQRLAKYADVFDKKVIDQLARRHYTGWGRLSAKLLNGIRDKQSCKTIMDYLIDDAQSNRNLMQLITDDNLTFKDDIVKAQ | |
| | YVDNSDDLHQVVQSLAGSPAIKKGILQSLKIVDELVKVMGKEPEQIVVEMARENQTTAKGRRNSQQRYKRLKEAIKSLDRDLNHKILKEHPTDNQALQNNRLFLYYLQNGRDMYTGESL | |
| | DINRLSDYDIDHVIPQAFIKDNSIDNRVLTSSKANRGKSDDVPSEDVVNRMRPFWNKLLSSGLISQRKYNNLTKKELTLDDKAGFIKRQLVETRQITKHVARMLDERFNKEFDDNNKRI | |
| | RRVKIVTLKSNLVSSFRKEFELYKVREINDYHHAHDAYLNAVVVKALLVKYPKLEPEFVYGEYLKYNSYRERKTATQKMFFYSNIMNMFKSKVKLADDQIVERPMIEVNDETGEIAWDK | |
| | TKHITTVKKVLSYPQVNIVKKVEEQTIGQNGGLFDDNPKSPLEVIPSKLVPLKKALNPEKYGGYQKPTTAYPILLIVDTKQLIPISVMDKKRFEQNPVKFLKDKGYQQIEKNNFVKLPK | |
| | YTLVDIGNGIKRLWASSKEVHKGNQLVVSKKSQDLLYHAHHLDNDYSNEYVKNHYQQFDILFNEITSFSKKCKLGKEHIQKIEEAYSKERDFASIEELADGFIKLLGFTQLGATSPFSF | |
| | LGIKLNQKQYTGKKDYLLPCMEATLIHQSITGLYETRIDLSKLGGD | |
| 249 | MKKPYSIGLDIGTNSVGWAVVTDDYKVPAKKMKVLGNTDKSHIKKNLLGALLFDSGNTAEDRRLKRTARRRYTRRRNRILYLQEIFSEEMDKVDDSFFHRLEDSFLVTEDKRGERHPIF | WP_002305844.1 |
| | GNLEEEVKYHENFPTIYHLRQYLADNPEKVDLRLVYLALAHIIKFRGHFLIEGKFDTRNNDVQRLFQEFLAVYDNTFENSSLQEQNVQVEEILTDKISKSAKKDRVLKLFPNEKSNGRF | [Streptococcus |
| | AEFLKLIVGNQADFKKHFELEEKAPLQFSKDTYEEELEVLLAQIGDNYAELFLSAKKLYDSILLSGILTVTDVSTKAPLSASMIQRYNEHQMDLAQLKQFIRQKLSDKYNEVFSDVSKD | mutans] |
| | GYAGYIDGKTNQEAFYKYLKGLLNKIEGSGYFLDKIEREDFLRKQRTFDNGSIPHQIHLQEMRAIIRRQAEFYPFLADNQDRIEKILTFRIPYYVGPLARGKSDFAWLSRKSADKITPW | |
| | NFDEIVDKESSAEAFINRMTNYDLYLPNQKVLPKHSLLYEKFTVYNELTKVKYKTEQGKTAFFDANMKQEIFDGVFKVYRKVTKDKLMDFLEKEFDEFRIVDLTGLDKENKVFNASYGT | |
| | YHDLCKILDKDFLDNSKNEKILEDIVLTLTLFEDREMIRKRLENYSDLLTKEQVKKLERRHYTGWGRLSAELIHGIRNKESRKTILDYLIDDGNSNRNFMQLINDDALSFKEEIAKAQV | |
| | IGETDNLNQVVSDIAGSPAIKKGILQSLKIVDELVKIMGHQPENIVVEMARENQFTKQGRRNSQQRLKGLTDSIKEFGSQILKEHPVENSQLQNDRLFLYYLQNGRDMYTGEELDIDYL | |
| | SQYDIDHIIPQAFIKDNSIDNRVLTSSKENRGKSDDVPSKDVVRKMKSYWSKLLSAKLITQRKFDNLTKAERGGLTDDDKAGFIKRQLVETRQITKHVARILDERFYTETDENNKKIRQ | |
| | VKIVTLKSNLVSNFRKEFELYKVREINDYHHAHDAYLNAVIGKALLGVYPQLEPEFVYGDYPHFHGHKENKATAKKFFYSNIMNFFKKDDVRTDKNGEIIWKKDEHISNIKKVLSYPQV | |
| | NIVKKVEEQTGGFSKESILPKGNSDKLIPRKTKKFYWDTKKYGGFDSPIVAYSILVIADIEKGKSKKLKTVKALVGVTIMEKMTFERDPVAFLERKGYRNVQEENIIKLPKYSLFKLEN | |
| | GRKRLLASARELQKGNEIVLPNHLGTLLYHAKNIHKVDEPKHLDYVDKHKDEFKELLDVVSNFSKKYTLAEGNLEKIKELYAQNNGEDLKELASSFINLLTFTAIGAPATFKFFDKNID | |
| | RKRYTSTTEILNATLIHQSITGLYETRIDLSKLGGD | |
| 250 | MKKPYSIGLDIGTNSVGWAVVTDDYKVPAKKMKVLGNTDKSHIKKNLLGALLFDSGNTAEDRRLKRTARRRYTRRRNRILYLQEIFSEEMGKVDDSFFHRLDESFLTDDDKNFDSHPIF | WP_002279859.1 |
| | GNKAEEDAYHQKFPTIYHLRKHLADSTEKADLRLVYLALAHMIKFRGHFLIEGELNAENTDVQKLFADFVGVYDRTFDDSHLSEITVDASSILTEKISKSRRLEKLINNYPKEKKNTLF | [Streptococcus |
| | GNLIALSLGLQPNFKTNFKLSEDAKLQFSKDTYEEELEVLLAQIGDNYAELFLSAKKLYDSILLSGILTVTDVSTKAPLSASMIQRYNEHQMDLAQLKQFIRQKLSDKYNEVFSDVSKD | mutans] |
| | GYAGYIDGKTNQEAFYKYLKGLLNKIEGSGYFLDKIEREDFLRKQRTFDNGSIPHQIHLQEMRAIIRRQAEFYPFLADNQDRIEKILTFRIPYYVGPLARGKSDFAWLSRKSADKITPW | |
| | NFDEIVDKESSVEAFINRMTNYDLYLPNQKVLPKHSLLYEKFTVYNELTKVKYKTEQGKTAFFDANMKQEIFDGVFKVYRKVTKDKLMDFLEKEFDEFRIVDLTGLDKENKAFNASYGT | |
| | YHDLRKILDKDFLDNSKNEKILEDIVLTLTLFEDREMIRKRLKNYSDLLTKEQLKKLERRHYTGWGRLSAELIHGIRNKESRKTILDYLIDDGNSNRNFMQLINDDALSFKEEIAKAQV | |
| | IGETDNLNQVVSDIAGSPAIKKGILQSLKIVDELVKIMGHQPENIVVEMARENQFTNQGRRNSQQRLKGLTDSIKEFGSQILKEHPVENSQLQNDRLFLYYLQNGRDMYTGEELDIDYL | |
| | SQYDIDHIIPQAFIKDNSIDNRVLTSSKENRGKSDDVPSKDVVRKMKSYWSKLLSAKLITQRKFDNLTKGERGGLTDDDKAGFIKRQLVETRQITKHVARILDERFNTETDENNKKIRQ | |
| | VKIVTLKSNLVSNFRKEFELYKVREINDYHHAHDAYLNAVIGKALLGVYPQLEPEFVYGDYPHFHGHKENKATAKKFFYSNIMNFFKKDDVRTDKNGEIIWKKDEYISNIKKVLSYPQV | |
| | NIVKKVEEQTGGFSKESILPKGDSDKLIPRKTKKFYWDTKKYGGFDSPIVAYSILVIADIEKGKSKKLKTVKALVGVTIMEKMTFERDPVAFLERKGYRNVQEENIIKLPKYSLFKLEN | |
| | GRKRLLASARELQKGNEIVLPNHLGTLLYHAKNIHKVDEPKHLDYVDKHKDEFKELLDVVSNFSKKYTLAEGNLEKIKELYAQNNGEDLKELASSFINLLTFTAIGAPATFKFFDKNID | |
| | RKRYTSTTEILNATLIHQSITGLYETRIDLSKLGGD | |
| 251 | MKKPYSIGLDIGTNSVGWAVVTDDYKVPAKKMKVLGNTDKSHIKKNLLGALLFDSGNTAEDRRLKRTARRRYTRRRNRILYLQEIFSEEMGKVDDSFFHRLDESFLTDDDKNFDSYPIF | WP_002264920.1 |
| | GNKAEEDAYHQKFPTIYHLRKHLADSTEKADLRLVYLALAHMIKFRGHFLIEGELNAENTDVQKLFADFVGVYDRTFDDSHLSEITVDASSILTEKISKSRRLEKLINNYPKEKKNTLF | [Streptococcus |
| | RNLVALSLGLQPNFKTNFKLSEDAKLQFSKDTYEEDLEELLGKIGDDYADLFTLAKNLYDAILLSGILTADDSSTKAPLSASMIKRYAEHHEDLEKLKEFIKANKPELYHDIFKDETKN | mutans] |
| | GYAGYIENGVKQDEFYKYLKNTLSKIAGSDYFLDKIEREDFLRKQRTFDNGSIPHQIHLQEMHAILRRQGDYYPFLKENQDRIEKILTFRIPYYVGPLARGKSDFAWLSRKSADKITPW | |
| | NFDEIVDKESSVEAFINRMTNYDLYLPNQKVLPKHSLLYEKFTVYNELTKVKYKTEQGKTAFFDANMKQEIFDGVFKVYRKVTKDKLMDFLEKEFDEFRIVDLTGLDKENKAFNASYGT | |
| | YHDLRKILDKDFLDNSKNEKILEDIVLTLTLFEDREMIRKRLKNYSDLLTKEQLKKLERRHYTGWGRLSAELIHGIRNKESRKTILDYLIDDGNSNRNFMQLINDDALSFKEEIAKAQV | |
| | IGETDNLNQVVSDIAGSPAIKKGILQSLKIVDELVKIMGHQPENIVVEMARENQFTNQGRRNSQQRLKGLTDSIKEFGSQILKEHPVENSQLQNDRLFLYYLQNGRDMYTGEELDIDYL | |
| | SQYDIDHIIPQAFIKDNSIDNRVLTSSKENRGKSDDVPSKDVVRKMKSYWSKLLSAKLITQRKFDNLTKGERGGLTDDDKAGFIKRQLVETRQITKHVARILDERFNTETDENNKKIRQ | |
| | VKIVTLKSNLVSNFRKEFELYKVREINDYHHAHDAYLNAVIGKALLGVYPQLEPEFVYGDYPHFHGHKENKATAKKFFYSNIMNFFKKDDVRTDKNGEIIWKKDEYISNIKKVLSYPQV | |
| | NIVKKVEEQTGGFSKESILPKGDSDKLIPRKTKKFYWDTKKYGGFDSPIVAYSILVIADIEKGKSKKLKTVKALVGVTIMEKMTFERDPVAFLERKGYRNVQEENIIKLPKYSLFKLEN | |
| | GRKRLLASARELQKGNEIVLPNHLGTLLYHAKNIHKVDEPKHLDYVDKHKDEFKELLDVVSNFSKKYTLAEGNLEKIKELYAQNNGEDLKELASSFINLLTFTAIGAPATFKFFDKNID | |
| | RKRYTSTTEILNATLIHQSITGLYETRIDLSKLGGD | |
| 252 | MKKPYSIGLDIGTNSVGWAVVTDDYKVPAKKMKVLGNTDKSHIKKNLLGALLFDSGNTAEDRRLKRTARRRYTRRRNRILYLQEIFSEEMGKVDDSFFHRLEDSFLVTEDKRGECHPIF | WP_019315370.1 |
| | GNLEEEVKYHENFPTIYHLRQYLADNPEKTDLRLVYLALAHIIKFRGHFLIEGKFDTRNNDVQRLFQEFLAVYDNTFENSSLQEQNVQVEEILTDKISKSAKKDRVLKLFPNEKSNGRF | [Streptococcus |
| | AEFLKLIVGNQADFKKHFELEEKAPLQFSKDTYEEELEVLLAQIGDNYAELFLSAKKLYDSILLSGILTVTDVSTKAPLSASMIQRYNEHQMDLTQLKQFIRQKLSDKYNEVFSDVSKD | mutans] |
| | GYAGYIDGKTNQEAFYKYLKGLLNKIEGNGYFLDKIEREDFLRKQRTFDNGSIPHQIHLQEMRAIIRRQAEFYPFLADNQDRIEKILTFRIPYYVGPLARGKSDFAWLSRKSADKITPW | |
| | NFDEIVDKESSAEAFINRMTNYDLYLPNQKVLPKHSLLYEKFTVYNELTKVKYKTEQGKTAFFDANMKQEIFDGVFKVYRKVTKDKLMDFLEKEFDEFRIVDLTGLDKENKAFNASYGT | |
| | YHDLRKILDKDFLDNSKNEKILEDIVLTLTLFEDREMIRKRLENYSDLLTKEQVKKLERRHYTGWGRLSAELIHGIRNKESRKTLLDYLIDDGNSNRNFMQLINDDALSFKEEIAKAQV | |
| | IGETDNLNQVVSDIAGSPAIKKGILQSLKIVDELVKIMGHQPENIVVEMARENQFTNQGRRNSQQRLKGLTDSIKEFGSQILKEHPVENSQLQNDRLFLYYLQNGRDMYTGEELDIDYL | |
| | SQYDIDHIIPQAFIKDNSIDNRVLTSSKENRGKSDDVPSKDVVRKMKPYWSKLLSAKLITQRKFDNLTKAERGGLTDDDKAGFIKRQLVETRQITKHVARILDERFNTETDENNKKIRQ | |
| | VKIVTLKSNLVSNFRKEFELYKVREINDYHHAHDAYLNAVIGKALLGVYPQLEPEFVYGDYPHFHGHEENKATAKKFFYSNIMNFFKKDDVRTDKNGEIIWKKDEHISNIKKVLSYPQV | |
| | NIVKKVEEQTGGFSKESILPKGNSDKLIPRKTKKFYWDTKKYGGFDSPIVAYSILVIADIEKGKSKKLKTVKALVGVTIMEKMTFERDPVAFLERKGYRNVQEENIIKLPKYSLFKLEN | |
| | GRKRLLASARELQKGNEIVLPNHLGTLLYHAKNIHKVDEPKHLDYVDKHKDEFKELLDVVSNFSKKYTLAEGNLEKIKELYAQNNGEDLKELSSSFINLLTFTAIGAPAAFKFFDKNID | |
| | RKRYTSTTEILNATLIHQSITGLYETRIDLSKLGGD | |
| 253 | MKKPYSIGLDIGTNSVGWAVVTDDYKVPAKKMKVLGNTDKSHIKKNLLGALLFDSGNTAEDRRLKRTARRRYTRRRNRILYLQEIFSEEMGKVDDSFFHRLEDSFLVTEDKRGERHPIF | WP_002296423.1 |
| | GNLEEEVKYHENFPTIYHLRQYLADNPEKTDLRLVYLALAHIIKFGGHFLIEGKFDTRNNDVQRLFQEFLAVYDNTFENSSLQEQNVQVEEILTDKISKSAKKDRVLKLFPNEKSNGRF | [Streptococcus |
| | AEFLKLIVGNQADFKKHFELEEKAPLQFSKDIYEEELEVLLAQIGDNYAELFLSAKKLYDSILLSGILTVTDVSTKAPLSASMIQRYNEHQMDLAQLKQFIRQKLSDKYNEVFSDVSKD | mutans] |
| | GYAGYIDGKTNQEAFYKYLKGLLNKIEGSGYFLDKIEREDFLRKQRTFDNGSIPHQIHLQEMRAIIRRQAEFYPFLADNQDRIEKILTFRIPYYVGPLARGKSDFAWLSRKSADKITPW | |
| | NFDEIVDKESSVEAFINRMTNYDLYLPNQKVLPKHSLLYEKFTVYNELTKVKYKTEQGKTAFFDANMKQEIFDGVFKVYRKVTKDKLMDFLEKEFDEFRIVDLTGLDKENKAFNASYGT | |
| | YHDLRKILDKDFLDNSKNEKILEDIVLTLTLFEDREMIRKRLKNYSDLLTKEQLKKLERRHYTGWGRLSAELIHGIRNKESRKTILDYLIDDGNSNRNFMQLINDDALSFKEEIAKAQV | |
| | IGETDNLNQVVSDIAGSPAIKKGILQSLKIVDELVKIMGHQPENIVVEMARENQFTNQGRRNSQQRLKGLTDSIKEFGSQILKEHPVENSQLQNDRLFLYYLQNGRDMYTGEELDIDYL | |
| | SQYDIDHIIPQAFIKDNSIDNRVLTSSKENRGKSDDVPSKNVVRKMKSYWSKLLSAKLITQRKFDNLTKAERGGLTDDDKAGFIKRQLVETRQITKHVARILDERFHTETDENNKKIRQ | |
| | VKIVTLKSNLVSNFRKEFELYKVREINDYHHAHDAYLNAVIGKALLGVYPQLEPEFVYGDYPHFHGHKENKATAKKFFYSNIMNFFKKDDVRTDKNGEIIWKKDEHISNIKKVLSYPQV | |
| | NIVKKVEEQTGGFSKESILPKGNSDKLIPRKTKKFYWDTKKYGGFDSPIVAYSILVIADIEKGKSKKLKTVKALVGVTIMEKMTFERDPVAFLERKGYRNVQEENIIKLPKYSLFKLEN | |
| | GRKRLLASARELQKGNEIVLPNHLGTLLYHAKNIHKVDEPKHLDYVDKHKDEFKELLDVVSNFSKKYTLAEGNLEKIKELYAQNNGEDLKELASSFINLLTFTAIGAPATFKFFDKNID | |
| | RKRYTSTTEILNATLIHQSITGLYETRIDLSKLGG | |
| 254 | MKKPYSIGLDIGTNSVGWAVVTDDYKVPAKKMKVLGNTDKSHIKKNLLGALLFDSGNTAEDRRLKRTARRRYTRRRNRILYLQEIFSEEMGKVDDSFFHRLEDSFLVTEDKRGERHPIF | WP_002269043.1 |
| | GNLEEEVKYHENFPTIYHLRQYLADNPEKTDLRLVYLALAHIIKFRGHFLIEGKFDTRNNDVQRLFQEFLAVYDNTFENSSLQEQNVQVEEILTDKISKSAKKDRVLKLFPNEKSNGRF | [Streptococcus |
| | AEFLKLIVGNQADFKKHFELEEKAPLQFSKDIYEEELEVLLAQIGDNYAELFLSAKKLYDSILLSGILTVTDVSTKAPLSASMIQRYNEHQMDLAQLKQFIRQKLSDKYNEVFSDVSKD | mutans] |
| | GYAGYIDGKTNQEAFYKYLKGLLNKIEGSGYFLDKIEREDFLRKQRTFDNGSIPHQIHLQEMRAIIRRQAEFYPFLADNQDRIEKILTFRIPYYVGPLARGKSDFAWLSRKSADKITPW | |
| | NFDEIVDKESSVEAFINRMTNYDLYLPNQKVLPKHSLLYEKFTVYNELTKVKYKTEQGKTAFFDANMKQEIFDGVFKVYRKVTKDKLMDFLEKEFDEFRIVDLTGLDKENKAFNASYGT | |
| | YHDLRKILDKDFLDNSKNEKILEDIVLTLTLFEDREMIRKRLKNYSDLLTKEQLKKLERRHYTGWGRLSAELIHGIRNKESRKTILDYLIDDGNSNRNFMQLINDDALSFKEEIAKAQV | |
| | IGETDNLNQVVSDIAGSPAIKKGILQSLKIVDELVKIMGHQPENIVVEMARENQFTNQGRRNSQQRLKGLTDSIKEFGSQILKEHPVENSQLQNDRLFLYYLQNGRDMYTGEELDIDYL | |
| | SQYDIDHIIPQAFIKDNSIDNRVLTSSKENRGKSDDVPSKDVVRKMKSYWSKLLSAKLITQRKFDNLTKAERGGLTDDDKAGFIKRQLVETRQITKHVARILDERFNTETDENNKKIRQ | |
| | VKIVTLKSNLVSNFRKEFELYKVREINDYHHAHDAYLNAVIGKALLGVYPQLEPEFVYGDYPHFHGHKENKATAKKFFYSNIMNFFKKDDVRTDKNGEIIWKKDEHISNIKKVLSYPQV | |
| | NIVKKVEEQTGGFSKESILPKGNSDKLIPRKTKKFYWDTKKYGGFDSPIVAYSILVIADIEKGKSKKLKTVKALVGVTIMEKMTFERDPVAFLERKGYRNVQEENIIKLPKYSLFKLEN | |
| | GRKRLLASARELQKGNEIVLPNHLGTLLYHAKNIHKVDEPKHLDYVDKHKDEFKELLDVVSNFSKKYTLAEGNLEKIKELYAQNNGEDLKELASSFINLLTFTAIGAPATFKFFDKNID | |
| | RKRYTSTTEILNATLIHQSITGLYETRIDLNKLGGD | |
| 255 | MKKPYSIGLDIGTNSVGWAVVTDDYKVPAKKMKVLGNTDKSHIKKNLLGALLFDSGNTAEDRRLKRTARRRYTRRRNRILYLQEIFSEEMGKVDDSFFHRLEDSFLVTEDKRGERHPIF | WP_002283846.1 |
| | GNLEEEVKYHENFPTIYHLRQYLADNPEKTDLRLVYLALAHIIKFRGHFLIEGKFDTRNNDVQRLFQEFLAVYDNTFENSSLQEQNVQVEEILTDKISKSAKKDRVLKLFPNEKSNGRF | [Streptococcus |
| | AEFLKLIVGNQADFKKHFELEEKAPLQFSKDIYEEELEVLLAQIGDNYAELFLSAKKLYDSILLSGILTVTDVSTKAPLSASMIQRYNEHQMDLAQLKQFIRQKLSDKYNEVFSDVSKD | mutans] |
| | GYAGYIDGKTNQEAFYKYLKGLLNKIEGSGYFLDKIEREDFLRKQRTFDNGSIPHQIHLQEMRAIIRRQAEFYPFLADNQDRIEKILTFRIPYYVGPLARGKSDFAWLSRKSADKITPW | |
| | NFDEIVDKESSVEAFINRMTNYDLYLPNQKVLPKHSLLYEKFTVYNELTKVKYKTEQGKTAFFDANMKQEIFDGVFKVYRKVTKDKLMDFLEKEFDEFRIVDLTGLDKENKAFNASYGT | |
| | YHDLRKILDKDFLDNSKNEKILEDIVLTLTLFEDREMIRKRLKNYSDLLTKEQLKKLERRHYTGWGRLSAELIHGIRNKESRKTILDYLIDDGNSNRNFMQLINDDALSFKEEIAKAQV | |
| | IGETDNLNQVVSDIAGSPAIKKGILQSLKIVDELVKIMGHQPENIVVEMARENQFTNQGRRNSQQRLKGLTDSIKEFGSQILKEHPVENSQLQNDRLFLYYLQNGRDMYTGEELDIDYL | |
| | SQYDIDHIIPQAFIKDNSIDNRVLTSSKENRGKSDDVPSKNVVRKMKSYWSKLLSAKLITQRKFDNLTKAERGGLTDDDKAGFIKRQLVETRQITKHVARILDERFHTETDENNKKIRQ | |
| | VKIVTLKSNLVSNFRKEFELYKVREINDYHHAHDAYLNAVIGKALLGVYPQLEPEFVYGDYPHFHGHKENKATAKKFFYSNIMNFFKKDDVRTDKNGEIIWKKDEHISNIKKVLSYPQV | |
| | NIVKKVEEQTGGFSKESILPKGNSDKLIPRKTKKFYWDTKKYGGFDSPIVAYSILVIADIEKGKSKKLKTVKALVGVTIMEKMTFERDPVAFLERKGYRNVQEENIIKLPKYSLFKLEN | |
| | GRKRLLASARELQKGNEIVLPNHLGTLLYHAKNIHKVDEPKHLDYVDKHKDEFKELLDVVSNFSKKYTLAEGNLEKIKELYAQNNGEDLKELASSFINLLTFTAIGAPATFKFFDKNID | |
| | RKRYTSTTEILNATLIHQSITGLYETRIDLSKLGGD | |
| 256 | MKKPYSIGLDIGTNSVGWAVVTDDYKVPAKKMKVLGNTDKSHIKKNLLGALLFDSGNTAEDRRLKRTARRRYTRRRNRILYLQEIFSEEMGKVDDSFFHRLEDSFLVTEDKRGERHPIF | WP_002288990.1 |
| | GNLEEEVKYHENFPTIYHLRQYLADNPEKTDLRLVYLALAHIIKFRGHFLIEGKFDTRNNDVQRLFQEFLAVYDNTFENSSLQEQNVQVEEILTDKISKSAKKDRVLKLFPNEKSNGRF | [Streptococcus |
| | AEFLKLIVGNQADFKKHFELEEKAPLQFSKDIYEEELEVLLAQIGDNYAELFLSAKKLYDSILLSGILTVTDVSTKAPLSASMIQRYNEHQMDLAQLKQFIRQKLSDKYNEVFSDVSKD | mutans] |
| | GYAGYIDGKTNQEAFYKYLKGLLNKIEGSGYFLDKIEREDFLRKQRTFDNGSIPHQIHLQEMRAIIRRQAEFYPFLADNQDRIEKILTFRIPYYVGPLARGKSDFAWLSRKSADKITPW | |
| | NFDEIVDKESSVEAFINRMTNYDLYLPNQKVLPKHSLLYEKFTVYNELTKVKYKTEQGKTAFFDANMKQEIFDGVFKVYRKVTKDKLMDFLEKEFDEFRIVDLTGLDKENKAFNASYGT | |
| | YHDLRKILDKDFLDNSKNEKILEDIVLTLTLFEDREMIRKRLKNYSDLLTKEQLKKLERRHYTGWGRLSAELIHGIRNKESRKTILDYLIDDGNSNRNFMQLINDDALSFKEEIAKAQV | |
| | IGETDNLNQVVSDIAGSPAIKKGILQSLKIVDELVKIMGHQPENIVVEMARENQFTNQGRRNSQQRLKGLTDSIKEFGSQILKEHPVENSQLQNDRLFLYYLQNGRDMYTGEELDIDYL | |
| | SQYDIDHIIPQAFIKDNSIDNRVLTSSKENRGKSDDVPSKDVVRKMKSYWSKLLSAKLITQRKFDNLTKAERGGLTDDDKAGFIKRQLVETRQITKHVARILDERFNTETDENNKKIRQ | |
| | VKIVTLKSNLVSNFRKEFELYKVREINDYHHAHDAYLNAVIGKALLGVYPQLEPEFVYGDYPHFHGHKENKATAKKFFYSNIMNFFKKDDVRTDKNGEIIWKKDEHISNIKKVLSYPQV | |
| | NIVKKVEEQTGGFSKESILPKGNSYKLIPRKTKKFYWDTKKYGGFDSPIVAYSILVIADIEKGKSKKLKTVKALVGVTIMEKMTFERDPVAFLERKGYRNVQEENIIKLPKYSLFKLEN | |
| | GRKRLLASARELQKGNEIVLPNHLGTLLYHAKNIHKVDEPKHLDYVDKHKDEFKELLDVVSNFSKKYTLAEGNLEKIKELYAQNNGEDLKELASSFINLLTFTAIGAPAAFKFFDKNID | |
| | RKRYTSTTEILNATLIHQSITGLYETRIDLSKLGGD | |
| 257 | MKKPYSIGLDIGTNSVGWAVVTDDYKVPAKKMKVLGNTDKSHIKKNLLGALLFDSGNTAEDRRLKRTARRRYTRRRNRILYLQEIFSEEMGKVDDSFFHRLEDSFLVTEDKRGERHPIF | WP_002290427.1 |
| | GNLEEEVKYHENFPTIYHLRQYLADNPEKTDLRLVYLALAHIIKFRGHFLIEGKFDTRNNDVQRLFQEFLAVYDNTFENSSLQEQNVQVEEILTDKISKSAKKDRVLKLFPNEKSNGRF | [Streptococcus |
| | AEFLKLIVGNQADFKKHFELEEKAPLQFSKDIYEEELEVLLAQIGDNYAELFLSAKKLYDSILLSGILTVTDVSTKAPLSASMIQRYNEHQMDLAQLKQFIRQKLSDKYNEVFSDVSKD | mutans] |
| | GYAGYIDGKTNQEAFYKYLKGLLNKIEGSGYFLDKIEREDFLRKQRTFDNGSIPHQIHLQEMRAIIRRQAEFYPFLADNQDRIEKILTFRIPYYVGPLARGKSDFAWLSRKSADKITPW | |
| | NFDEIVDKESSAEAFINRMTNYDLYLPNQKVLPKHSLLYEKFTVYNELTKVKYKTEQGKTAFFDANMKQEIFDGVFKVYRKVTKDKLMDFLEKEFDEFRIVDLTGLDKENKAFNASYGT | |
| | YHDLRKILDKDFLDNSKNEKILEDIVLTLTLFEDREMIRKRLKNYSDLLTKEQLKKLERRHYTGWGRLSAELIHGIRNKESRKTILDYLIDDGNSNRNFMQLINDDALSFKEEIAKAQV | |
| | IGETDNLNQVVSDIAGSLAIKKGILQSLKIVDELVKIMGHQPENIVVEMARENQFTNQGRRNSQQRLKGLTDSIKEFGSQILKEHPVENSQLQNDRLFLYYLQNGRDMYTGEELDIDYL | |
| | SQYDIDHIIPQAFIKDNSIDNRVLTSSKENRGKSDDVPSKDVVRKMKSYWSKLLSAKLITQRKFDNLTKGERGGLTDDDKAGFIKRQLVETRQITKHVARILDERFNTETDENNKKIRQ | |
| | VKIVTLKSNLVSNFRKEFELYKVREINDYHHAHDAYLNAVIGKALLGVYPQLEPEFVYGDYPHFHGHKENKATAKKFFYSNIMNFFKKDDVRTDKNGEIIWKKDEYISNIKKVLSYPQV | |
| | NIVKKVEEQTGGFFKESILPKGDSDKLIPRKTKKFYWDTKKYGGFDSPIVAYSILVIADIEKGKSKKLKTVKALVGVTIMEKMTFERDPVAFLERKGYRNVQEENIIKLPKYSLFKLEN | |
| | GRKRLLASARELQKGNEIVLPNHLGTLLYHAKNIHKVDEPKHLDYVDKHKDEFKELLDVVSNFSKKYTLAEGNLEKIKELYAQNNGEDLKELASSFINLLTFTAIGAPATFKFFDKNID | |
| | RKRYTSTTEILNATLIHQSITGLYETRIDLSKLGGD | |
| 258 | MKKPYSIGLDIGTNSVGWAVVTDDYKVPAKKMKVLGNTDKSHIKKNLLGALLFDSGNTAEDRRLKRTARRRYTRRRNRILYLQEIFSEEMGKVDDSFFHRLEDSFLVTEDKRGERHPIF | WP_002310390.1 |
| | GNLEEEVKYHENFPTIYHLRQYLADNPEKTDLRLVYLALAHIIKFRGHFLIEGKFDTRNNDVQRLFQEFLAVYDNTFENSSLQEQNVQVEEILTDKISKSAKKDRVLKLFPNEKSNGRF | [Streptococcus |
| | AEFLKLIVGNQADFKKHFELEEKAPLQFSKDIYEEELEVLLAQIGDNYAELFLSAKKLYDSILLSGILTVTDVSTKAPLSASMIQRYNEHQMDLAQLKQFIRQKLSDKYNEVFSDVSKD | mutans] |
| | GYAGYIDGKTNQEAFYKYLKGLLNKIEGSGYFLDKIEREDFLRKQRTFDNGSIPHQIHLQEMRAIIRRQAEFYPFLADNQDRIEKILTFRIPYYVGPLARGKSDFAWLSRKSADKITPW | |
| | NFDEIVDKESSAEAFINRMTNYDLYLPNQKVLPKHSLLYEKFTVYNELTKVKYKTEQGKTAFFDANMKQEIFDGVFKVYRKVTKDKLMDFLEKEFDEFRIVDLTGLDKENKAFNASYGT | |
| | YHDLRKILDKDFLDNSKNEKILEDIVLTLTLFEDREMIRKRLKNYSDLLTKEQLKKLERRHYTGWGRLSAELIHGIRNKESRKTILDYLIDDGNSNRNFMQLINDDALSFKEEIAKAQV | |
| | IGETDNLNQVVSDIAGSLAIKKGILQSLKIVDELVKIMGHQPENIVVEMARENQFTNQGRRNSQQRLKGLTDSIKEFGSQILKEHPVENSQLQNDRLFLYYLQNGRDMYTGEELDIDYL | |
| | SQYDIDHIIPQAFIKDNSIDNRVLTSSKENRGKSDDVPSKDVVRKMKSYWSKLLSAKLITQRKFDNLTKGERGGLTDDDKAGFIKHQLVETRQITKHVARILDERFNTETDENNKKIRQ | |
| | VKIVTLKSNLVSNFRKEFELYKVREINDYHHAHDAYLNAVIGKALLGVYPQLEPEFVYGDYPHFHGHKENKATAKKFFYSNIMNFFKKDDVRTDKNGEIIWKKDEYISNIKKVLSYPQV | |
| | NIVKKVEEQTGGFFKESILPKGDSDKLIPRKTKKFYWDTKKYGGFDSPIVAYSILVIADIEKGKSKKLKTVKALVGVTIMEKMTFERDPVAFLERKGYRNVQEENIIKLPKYSLFKLEN | |
| | GRKRLLASARELQKGNEIVLPNHLGTLLYHAKNIHKVDEPKHLDYVDKHKDEFKELLDVVSNFSKKYTLAEGNLEKIKELYAQNNGEDLKELASSFINLLTFTAIGAPATFKFFDKNID | |
| | RKRYTSTTEILNATLIHQSITGLYETRIDLSKLGGD | |
| 259 | MKKPYSIGLDIGTNSVGWAVVTDDYKVPAKKMKVLGNTDKSHIKKNLLGALLFDSGNTAEDRRLKRTARRRYTRRRNRILYLQEIFSEEMGKVDDSFFHRLEDSFLVTEDKRGERHPIF | WP_002352408.1 |
| | GNLEEEVKYHENFPTIYHLRQYLADNPEKTDLRLVYLALAHIIKFRGHFLIEGKFDTRNNDVQRLFQEFLAVYDNTFENSSLQEQNVQVEEILTDKISKSAKKDRVLKLFPNEKSNGRF | [Streptococcus |
| | AEFLKLIVGNQADFKKHFELEEKAPLQFSKDIYEEELEVLLAQIGDNYAELFLSAKKLYDSILLSGILTVTDVSTKAPLSASMIQRYNEHQMDLAQLKQFIRQKLSDKYNEVFSDVSKD | mutans] |
| | GYAGYIDGKTNQEAFYKYLKGLLNKIEGSGYFLDKIEREDFLRKQRTFDNGSIPHQIHLQEMRAIIRRQAEFYPFLADNQDRIEKILTFRIPYYVGPLARGKSDFAWLSRKSADKITPW | |
| | NFDEIVDKESSAEAFINRMTNYDLYLPNQKVLPKHSLLYEKFTVYNELTKVKYKTEQGKTAFFDANMKQEIFDGVFKVYRKVTKDKLMDFLEKEFDEFRIVDLTGLDKENKAFNASYGT | |
| | YHDLRKILDKDFLDNSKNEKILEDIVLTLTLFEDREMIRKRLENYSDLLTKEQVKKLERRHYTGWGRLSAELIHGIRNKESRKTLLDYLIDDGNSNRNFMQLINDDALSFKEEIAKAQV | |
| | IGETDNLNQVVSDIAGSPAIKKGILQSLKIVDELVKIMGHQPENIVVEMARENQFTNQGQRNSQQRLKGLTDSIKEFGSQILKEHPVENSQLQNDRLFLYYLQNGRDMYTGEELDIDYL | |
| | SQYDIDHIIPQAFIKDNSIDNRVLTSSKENRGKSDDVPSKDVVRKMKSYWSKLLSAKLITQRKFDNLTKAERGGLTDDDKAGFIKRQLVETRQITKHVARILDERFNTETDENNKKIRQ | |
| | VKIVTLKSNLVSNFRKEFELYKVREINDYHHAHDAYLNAVIGKALLGVYPQLEPEFVYGDYPHFHGHKENKATAKKFFYSNIMNFFKKDDVRTDKNGEIIWKKDEYISNIKKVLSYPQV | |
| | NIVKKVEEQTGGFSKESILPKGDSDKLIPRKTKKFYWDTKKYGGFDSPIVAYSILVIADIEKGKSKKLKTVKALVGVTIMEKMTFERDPVAFLERKGYRNVQEENIIKLPKYSLFKLEN | |
| | GRKRLLASARELQKGNEIVLPDHLGTLLYHAKNIHKVDEPKHLDYVDKHKDEFKELLDVVSNFSKKYTLAEGNLEKIKELYAQNNGEDLKELASSFINLLTFTAIGAPATFKFFDKNID | |
| | RKRYTSTTEILNATLIHQSITGLYETRIDLSKLGGD | |
| 260 | MKKPYSIGLDIGTNSVGWAVVTDDYKVPAKKMKVLGNTDKSHIKKNLLGALLFDSGNTAEDRRLKRTARRRYTRRRNRILYLQEIFSEEMGKVDDSFFHRLEDSFLVTEDKRGERHPIF | WP_019805234.1 |
| | GNLEEEVKYHENFPTIYHLRQYLADNPEKTDLRLVYLALAHIIKFRGHFLIEGKFDTRNNDVQRLFQEFLAVYDNTFENSSLQEQNVQVEEILTDKISKSAKKDRVLKLFPNEKSNGRF | [Streptococcus |
| | AEFLKLIVGNQADFKKHFELEEKAPLQFSKDIYEEELEVLLAQIGDNYAELFLSAKKLYDSILLSGILTVTDVSTKAPLSASMIQRYNEHQMDLAQLKQFIRQKLSDKYNEVFSDVSKD | mutans] |
| | GYAGYIDGKTNQEAFYKYLKGLLNKIEGSGYFLDKIEREDFLRKQRTFDNGSIPHQIHLQEMRAIIRRQAEFYPFLADNQDRIEKILTFRIPYYVGPLARGKSDFAWLSRKSADKITPW | |
| | NFDEIVDKESSAEAFINRMTNYDLYLPNQKVLPKHSLLYEKFTVYNELTKVKYKTEQGKTAFFDANMKQEIFDGVFKVYRKVTKDKLMDFLEKEFDEFRIVDLTGLDKENKAFNASYGT | |
| | YHDLRKILDKDFLDNSKNEKILEDIVLTLTLFEDREMIRKRLKNYSDLLTKEQLKKLERRHYTGWGRLSAELIHGIRNKESRKTILDYLIDDGNSNRNFMQLINDDALSFKEEIAKAQV | |
| | IGETDNLNQVVSDIAGSLAIKKGILQNLKIVDELVKIMGHQPENIVVEMARENQFTNQGRRNSQQRLKGLTDSIKEFGSQILKEHPVENSQLQNDRLFLYYLQNGRDMYTGEELDIDYL | |
| | SQYDIDHIIPQAFIKDNSIDNRVLTSSKENRGKSDDVPSKDVVRKMKSYWSKLLSAKLITQRKFDNLTKGERGGLTDDDKAGFIKRQLVETRQITKHVARILDERFNTETDENNKKIRQ | |
| | VKIVTLKSNLVSNFRKEFELYKVREINDYHHAHDAYLNAVIGKALLGVYPQLEPEFVYGDYPHFHGHKENKATAKKFFYSNIMNFFKKDDVRTDKNGEIIWKKDEYISNIKKVLSYPQV | |
| | NIVKKVEEQTGGFFKESILPKGDSDKLIPRKTKKFYWDTKKYGGFDSPIVAYSILVIADIEKGKSKKLKTVKALVGVTIMEKMTFERDPVAFLERKGYRNVQEENIIKLPKYSLFKLEN | |
| | GRKRLLASARELQKGNEIVLPNHLGTLLYHAKNIHKVDEPKHLDYVDKHKDEFKELLDVVSNFSKKYTLAEGNLEKIKELYAQNNGEDLKELASSFINLLTFTAIGAPATFKFFDKNID | |
| | RKRYTSTTEILNATLIHQSITGLYETRIDLSKLGGD | |
| 261 | MKKPYSIGLDIGTNSVGWAVVTDDYKVPAKKMKVLGNTDKSHIKKNLLGALLFDSGNTAEDRRLKRTARRRYTRRRNRILYLQEIFSEEMGKVDDSFFHRLEDSFLVTEDKRGERHPIF | WP_002307203.1 |
| | GNLEEEVKYHENFPTIYHLRQYLADNPEKVDLRLVYLALAHIIKFRGHFLIEGKFDTRNNDVQKLFQEFLAVYDNTFENSSLQEQNVQVEEILTDKISKSAKKDRVLKLFPNEKSNGRF | [Streptococcus |
| | AEFLKLIVGNQADFKKHFELEEKAPLQLSKDTYEEELEVLLAQIGDNYAELFLSAKKLYDSILLSGILTVTDVSTKAPLSASMIQRYNEHQMDLAQLKQFIRQKLSDKYNEVFSDVSKD | mutans] |
| | GYAGYIDGKTNQEAFYKYLKGLLNKIEGSGYFLDKIEREDFLRKQRTFDNGSIPHQIHLQEMRAIIRRQAEFYPFLADNQDRIEKILTFRIPYYVGPLARGKSDFAWLSRKSADKITPW | |
| | NFDEIVDKESSVEAFINRMTNYDLYLPNQKVLPKHSLLYEKFTVYNELTKVKYKTEQGKTAFFDANMKQEIFDGVFKVYRKVTKDKLMDFLEKEFDEFRIVDLTGLDKENKAFNASYGT | |
| | YHDLRKILDKDFLDNSKNEKILEDIVLTLTLFEDREMIRKRLENYSDLLTKEQVKKLERRHYTGWGRLSAELIHGIRNKESRKTLLDYLIDDGNSNRNFMQLINDDALSFKEEIAKAQV | |
| | IGETDNLNQVVSDIAGSPAIKKGILQSLKIVDELVKIMGHQPENIVVEMARENQFTNQGRRNSQQRLKGLTDSIKEFGSQILKEHPVENSQLQNDRLFLYYLQNGRDMYTGEELDIDYL | |
| | SQYDIDHIIPQAFIKDNSIDNRVLTSSKENRGKSDDVPSKDVVRKMKSYWSKLLSAKLITQRKFDNLTKAERGGLTDDDKAGFIKRQLVETRQITKHVARILDERFNTETDENNKKIRQ | |
| | VKIVTLKSNLVSNFRKEFELYKVREINDYHHAHDAYLNAVIGKALLGVYPQLEPEFVYGDYPHFHGHKENKATAKKFFYSNIMNFFKKDDVRTDKNGEIIWKKDEYISNIKKVLSYPQV | |
| | NIVKKVEEQTGGFSKESILPKGNSDKLIPRKTKKFYWDTKKYGGFDSPIVAYSILVIADIEKGKSKKLKTVKALVGVTIMEKMTFERDPIAFLERKGYRNVQEENIIKLPKYSLFKLEN | |
| | GRKRLLASARELQKGNEIVLPNHLGTLLYHAKNIHKVDEPKHLDYVDKHKDEFKELLDVVSNFSKKYTLAEGNLEKIKELYAQNNGEDLKELASSFINLLTFTAIGAPATFKFFDKNID | |
| | RKRYTSTTEILNATLIHQSITGLYETRIDLSKLGGD | |
| 262 | MKKPYSIGLDIGTNSVGWAVVTDDYKVPAKKMKVLGNTDKSHIKKNLLGALLFDSGNTAEDRRLKRTARRRYTRRRNRILYLQEIFSEEMGKVDDSFFHRLEDSFLVTEDKRGERHPIF | WP_019314093.1 |
| | GNLEEEVKYHENFPTIYHLRQYLADNPEKVDLRLVYLALAHIIKFRGHFLIEGKFDTRNNDVQKLFQEFLAVYDNTFENSSLQEQNVQVEEILTDKISKSAKKDRVLKLFPNEKSNGRF | [Streptococcus |
| | AEFLKLIVGNQADFKKHFELEEKAPLQLSKDTYEEELEVLLAQIGDNYAELFLSAKKLYDSILLSGILTVTDVSTKAPLSASMIQRYNEHQMDLAQLKQFIRQKLSDKYNEVFSDVSKD | mutans] |
| | GYAGYIDGKTNQEAFYKYLKGLLNKIEGSGYFLDKIEREDFLRKQRTFDNGSIPHQIHLQEMRAIIRRQAEFYPFLADNQDRIEKILTFRIPYYVGPLARGKSDFAWLSRKSADKITPW | |
| | NFDEIVDKESSVEAFINRMTNYDLYLPNQKVLPKHSLLYEKFTVYNELTKVKYKTEQGKTAFFDANMKQEIFDGVFKVYRKVTKDKLMDFLEKEFDEFRIVDLTGLDKENKAFNASYGT | |
| | YHDLRKILDKDFLDNSKNEKILEDIVLTLTLFEDREMIRKRLENYSDLLTKEQVKKLERRHYTGWGRLSAELIHGIRNKESRKTLLDYLIDDGNSNRNFMQLINDDALSFKEEIAKAQV | |
| | IGETDNLNQVVSDIAGSPAIKKGILQSLKIVDELVKIMGHQPENIVVEMARENQFTNQGRRNSQQRLKGLTDSIKEFGSQILKEHPVENSQLQNDRLFLYYLQNGRDMYTGEELDIDYL | |
| | SQYDIDHIIPQAFIKDNSIDNRVLTSSKENRGKSDDVPSKDVVRKMKSYWSKLLSAKLITQRKFDNLTKAERGGLTDDDKAGFIKRQLVETRQITKHVARILDERFNTETDENNKKIRQ | |
| | VKIVTLKSNLVSNFRKEFELYKVREINDYHHAHDAYLNAVIGKALLGVYPQLEPEFVYGDYPHFHGHKENKATAKKFFYSNIMNFFKKDDVRTDKNGEIIWKKDEYISNIKKVLSYPQV | |
| | NIVKKVEEQTGGFSKESILPKGNSDKLIPRKTKKFYWDTKKYGGFDSPIVAYSILVIADIEKGKSKKLKTVKALVGVTIMEKMTFERDPIAFLERKGYRNVQEENIIKLPKYSLFKLEN | |
| | GRKRLLASARELQKGNEIVLPNHLGTLLYHAKNIHKVDEPKHLDYVDKHKDEFKELLDVVSNFSKKYTLAEGNLEKIKELYAQNNGEDLKELASSFINLLTFTAIGAPAAFKFFDKNID | |
| | RKRYTSTTEILNATLIHQSITGLYETRIDLSKLGGD | |
| 263 | MKKPYSIGLDIGTNSVGWAVVTDDYKVPAKKMKVLGNTDKSHIKKNLLGALLFDSGNTAEDRRLKRTARRRYTRRRNRILYLQEIFSEEMGKVDDSFFHRLEDSFLVTEDKRGERHPIF | WP_002269448.1 |
| | GNLEEEVKYHENFPTIYHLRQYLADNPEKVDLRLVYLALAHIIKFRGHFLIEGKFDTRNNDVQRLFQEFLAVYDNTFENSSLQEQNVQVEEILTDKISKSAKKDRVLKLFPNEKSNGRF | [Streptococcus |
| | AEFLKLIVGNQADFKKHFELEEKAPLQFSKDTYEEELEVLLAQIGDNYAELFLSAKKLYDSILLSGILTVTDVSTKAPLSASMIQRYNEHQMDLAQLKQFIRQKLSDKYNEVFSDVSKD | mutans] |
| | GYAGYIDGKTNQEAFYKYLKGLLNKIEGSGYFLDKIEREDFLRKQRTFDNGSIPHQIHLQEMRAIIRRQAEFYPFLADNQDRIEKILTFRIPYYVGPLARGKSDFAWLSRKSADKITPW | |
| | NFDEIVDKESSAEAFINRMTNYDLYLPNQKVLPKHSLLYEKFTVYNELTKVKYKTEQGKTAFFDANMKQEIFDGVFKVYRKVTKDKLMDFLEKEFDEFRIVDLTGLDKENKVFNASYGT | |
| | YHDLCKILDKDFLDNSKNEKILEDIVLTLTLFEDREMIRKRLENYSDLLTKEQVKKLERRHYTGWGRLSAELIHGIRNKESRKTILDYLIDDGNSNRNFMQLINDDALSFKEEIAKAQV | |
| | IGETDNLNQVVSDIAGSPAIKKGILQSLKIVDELVKIMGHQPENIVVEMARENQFTNQGRQNSQQRLKGLTDSIKEFGSQILKEHPVENSQLQNDRLFLYYLQNGRDMYTGEELDIDYL | |
| | SQYDIDHIIPQAFIKDNSIDNRVLTSSKENRGKSDDVPSEDVVRKMKSYWSKLLSAKLITQRKFDNLTKAERGGLTDDDKAGFIKRQLVETRQITKHVARILDERFYTETDENNKKIRQ | |
| | VKIVTLKSNLVSNFRKEFELYKVREINDYHHAHDAYLNAVIGKALLGVYPQLEPEFVYGDYPHFHGHKENKATAKKFFYSNIMNFFKKDDVRTDKNGEIIWKKDEHISNIKKVLSYPQV | |
| | NIVKKVEEQTGGFSKESILPKGNSDKLIPRKTKKFYWDTKKYGGFDSPIVAYSILVIADIEKGKSKKLKTVKALVGVTIMEKMTFERDPVAFLERKGYRNVQEENIIKLPKYSLFKLEN | |
| | GRKRLLASARELQKGNEIVLPNHLGTLLYHAKNIHKVDEPKHLDYVDKHKDEFKELLDVVSNFSKKYTLAEGNLEKIKELYAQNNGEDLKELASSFINLLTFTAIGAPATFKFFDKNID | |
| | RKRYTSTTEILNATLIHQSITGLYETRIDLSKLGGD | |
| 264 | MKKPYSIGLDIGTNSVGWAVVTDDYKVPAKKMKVLGNTDKSHIKKNLLGALLFDSGNTAEDRRLKRTARRRYTRRRNRILYLQEIFSEEMGKVDDSFFHRLEDSFLVTEDKRGERHPIF | WP_002271977.1 |
| | GNLEEEVKYHENFPTIYHLRQYLADNPEKVDLRLVYLALAHIIKFRGHFLIEGKFDTRNNDVQRLFQEFLAVYDNTFENSSLQEQNVQVEEILTDKISKSAKKDRVLKLFPNEKSNGRF | [Streptococcus |
| | AEFLKLIVGNQADFKKHFELEEKAPLQFSKDTYEEDLEELLGKIGDDYADLFTLAKNLYDAILLSGILTADDSSTKAPLSASMIQRYNEHQMDLAQLKQFIRQKLSDKYNEVFSDVSKD | mutans] |
| | GYAGYIDGKTNQEAFYKYLKGLLNKIEGSGYFLDKIEREDFLRKQRTFDNGSIPHQIHLQEMRAIIRRQAEFYPFLADNQDRIEKILTFRIPYYVGPLARGKSDFAWLSRKSADKITPW | |
| | NFDEIVDKESSAEAFINRMTNYDLYLPNQKVLPKHSLLYEKFTVYNELTKVKYKTEQGKTAFFDANMKQEIFDGVFKVYRKVTKDKLMDFLEKEFDEFRIVDLTGLDKENKVFNASYGT | |
| | YHDLCKILDKDFLDNSKNEKILEDIVLTLTLFEDREMIRKRLENYSDLLTKEQVKKLERRHYTGWGRLSAELIHGIRNKESRKTILDYLIDDGNSNRNFMQLINDDALSFKEEIAKAQV | |
| | IGETDNLNQVVSDIAGSPAIKKGILQSLKIVDELVKIMGHQPENIVVEMARENQFTNQGRRNSQQRLKGLTDSIKEFGSQILKEHPVENSQLQNDRLFLYYLQNGRDMYTGEELDIDYL | |
| | SQYDIDHIIPQAFIKDNSIDNRVLTSSKENRGKSDDVPSKDVVRKMKSYWSKLLSAKLITQRKFDNLTKAERGGLTDDDKAGFIKRQLVETRQITKHVARILDERFYTETDENNKKIRQ | |
| | VKIVTLKSNLVSNFRKEFELYKVREINDYHHAHDAYLNAVIGKALLGVYPQLEPEFVYGDYPHFHGHKENKATAKKFFYSNIMNFFKKDDVRTDKNGEIIWKKDEHISNIKKVLSYPQV | |
| | NIVKKVEEQTGGFSKESILPKGNSDKLIPRKTKKFYWDTKKYGGFDSPIVAYSILVIADIEKGKSKKLKTVKALVGVTIMEKMTFERDPVAFLERKGYRNVQEENIIKLPKYSLFKLEN | |
| | GRKRLLASARELQKGNEIVLPNHLGTLLYHAKNIHKVDEPKHLDYVDKHKDEFKELLDVVSNFSKKYTLAEGNLEKIKELYAQNNGEDLKELASSFINLLTFTAIGAPATFKFFDKNID | |
| | RKRYTSTTEILNATLIHQSITGLYETRIDLSKLGGD | |
| 265 | MKKPYSIGLDIGTNSVGWAVVTDDYKVPAKKMKVLGNTDKSHIKKNLLGALLFDSGNTAEDRRLKRTARRRYTRRRNRILYLQEIFSEEMGKVDDSFFHRLEDSFLVTEDKRGERHPIF | WP_002272766.1 |
| | GNLEEEVKYHENFPTIYHLRQYLADNPEKVDLRLVYLALAHIIKFRGHFLIEGKFDTRNNDVQRLFQEFLAVYDNTFENSSLQEQNVQVEEILTDKISKSAKKDRVLKLFPNEKSNGRF | [Streptococcus |
| | AEFLKLIVGNQADFKKHFELEEKAPLQFSKDTYEEDLEELLGKIGDDYADLFTLAKNLYDAILLSGILTADDSSTKAPLSASMIQRYNEHQMDLAQLKQFIRQKLSDKYNEVFSDVSKD | mutans] |
| | GYAGYIDGKTNQEAFYKYLKGLLNKIEGSGYFLDKIEREDFLRKQRTFDNGSIPHQIHLQEMRAIIRRQAEFYPFLADNQDRIEKILTFRIPYYVGPLARGKSDFAWLSRKSADKITPW | |
| | NFDEIVDKESSAEAFINRMTNYDLYLPNQKVLPKHSLLYEKFTVYNELTKVKYKTEQGKTAFFDANMKQEIFDGVFKVYRKVTKDKLMDFLEKEFDEFRIVDLTGLDKENKVFNASYGT | |
| | YHDLCKILDKDFLDNSKNEKILEDIVLTLTLFEDREMIRKRLENYSDLLTKEQVKKLERRHYTGWGRLSAELIHGIRNKESRKTILDYLIDDGNSNRNFMQLINDDALSFKEEIAKAQV | |
| | IGETDNLNQVVSDIAGSPAIKKGILQSLKIVDELVKIMGHQPENIVVEMARENQFTNQGRRNSQQRLKGLTDSIKEFGSQILKEHPVENSQLQNDRLFLYYLQNGRDMYTGEELDIDYL | |
| | SQYDIDHIIPQAFIKDNSIDNRVLTSSKENRGKSDDVPSKDVVRKMKPYWSKLLSAKLITQRKFDNLTKAERGGLTDDDKAGFIKRQLVETRQITKHVARILDERFNTETDENNKKIRQ | |
| | VKIVTLKSNLVSNFRKEFELYKVREINDYHHAHDAYLNAVIGKALLGVYPQLEPEFVYGDYPHFHGHEENKATAKKFFYSNIMNFFKKDDVRTDKNGEIIWKKDEHISNIKKVLSYPQV | |
| | NIVKKVEEQTGGFSKESILPKGNSDKLIPRKTKKFYWDTKKYGGFDSPIVAYSILVIADIEKGKSKKLKTVKALVGVTIMEKMTFERDPVAFLERKGYRNVQEENIIKLPKYSLFKLEN | |
| | GRKRLLASARELQKGNEIVLPNHLGTLLYHAKNIHKVDEPKHLDYVDKHKDEFKELLDVVSNFSKKYTLAEGNLEKIKELYAQNNGEDLKELASSFINLLTFTAIGAPATFKFFDKNID | |
| | RKRYTSTTEILNATLIHQSITGLYETRIDLSKLGGD | |
| 266 | MKKPYSIGLDIGTNSVGWAVVTDDYKVPAKKMKVLGNTDKSHIKKNLLGALLFDSGNTAEDRRLKRTARRRYTRRRNRILYLQEIFSEEMGKVDDSFFHRLEDSFLVTEDKRGERHPIF | WP_002273241.1 |
| | GNLEEEVKYHENFPTIYHLRQYLADNPEKVDLRLVYLALAHIIKFRGHFLIEGKFDTRNNDVQRLFQEFLAVYDNTFENSSLQEQNVQVEEILTDKISKSAKKDRVLKLFPNEKSNGRF | [Streptococcus |
| | AEFLKLIVGNQADFKKHFELEEKAPLQFSKDTYEEELEVLLAQIGDNYAELFLSAKKLYDSILLSGILTVTDVSTKAPLSASMIQRYNEHQMDLAQLKQFIRQKLSDKYNEVFSDVSKD | mutans] |
| | GYAGYIDGKTNQEAFYKYLKGLLNKIEGSGYFLDKIEREDFLRKQRTFDNGSIPHQIHLQEMRAIIRRQAEFYPFLADNQDRIEKILTFRIPYYVGPLARGKSDFAWLSRKSADKITPW | |
| | NFDEIVDKESSAEAFINRMTNYDLYLPNQKVLPKHSLLYEKFTVYNELTKVKYKTEQGKTAFFDANMKQEIFDGVFKVYRKVTKDKLMDFLEKEFDEFRIVDLTGLDKENKVFNASYGT | |
| | YHDLCKILDKDFLDNSKNEKILEDIVLTLTLFEDREMIRKRLENYSDLLTKEQVKKLERRHYTGWGRLSAELIHGIRNKESRKTILDYLIDDGNSNRNFMQLINDDALSFKEEIAKAQV | |
| | IGETDNLNQVVSDIAGSPAIKKGILQSLKIVDELVKIMGHQPENIVVEMARENQFTKQGRRNSQQRLKGLTDSIKEFGSQILKEHPVENSQLQNDRLFLYYLQNGRDMYTGEELDIDYL | |
| | SQYDIDHIIPQAFIKDNSIDNRVLTSSKENRGKSDDVPSKDVVRKMKSYWSKLLSAKLITQRKFDNLTKAERGGLTDDDKAGFIKRQLVETRQITKHVARILDERFYTETDENNKKIRQ | |
| | VKIVTLKSNLVSNFRKEFELYKVREINDYHHAHDAYLNAVIGKALLGVYPQLEPEFVYGDYPHFHGHKENKATAKKFFYSNIMNFFKKDDVRTDKNGEIIWKKDEHISNIKKVLSYPQV | |
| | NIVKKVEEQTGGFSKESILPKGNSDKLIPRKTKKFYWDTKKYGGFDSPIVAYSILVIADIEKGKSKKLKTVKALVGVTIMEKMTFERDPVAFLERKGYRNVQEENIIKLPKYSLFKLEN | |
| | GRKRLLASARELQKGNEIVLPNHLGTLLYHAKNIHKVDEPKHLDYVDKHKDEFKELLDVVSNFSKKYTLAEGNLEKIKELYAQNNGEDLKELASSFINLLTFTAIGAPATFKFFDKNID | |
| | RKRYTSTTEILNATLIHQSITGLYETRIDLSKLGGD | |
| 267 | MKKPYSIGLDIGTNSVGWAVVTDDYKVPAKKMKVLGNTDKSHIKKNLLGALLFDSGNTAEDRRLKRTARRRYTRRRNRILYLQEIFSEEMGKVDDSFFHRLEDSFLVTEDKRGERHPIF | WP_002276448.1 |
| | GNLEEEVKYHENFPTIYHLRQYLADNPEKVDLRLVYLALAHIIKFRGHFLIEGKFDTRNNDVQRLFQEFLAVYDNTFENSSLQEQNVQVEEILTDKISKSAKKDRVLKLFPNEKSNGRF | [Streptococcus |
| | AEFLKLIVGNQADFKKHFELEEKAPLQFSKDTYEEELEVLLAQIGDNYAELFLSAKKLYDSILLSGILTVTDVSTKAPLSASMIQRYNEHQMDLAQLKQFIRQKLSDKYNEVFSDVSKD | mutans] |
| | GYAGYIDGKTNQEAFYKYLKGLLNKIEGSGYFLDKIEREDFLRKQRTFDNGSIPHQIHLQEMRAIIRRQAEFYPFLADNQDRIEKILTFRIPYYVGPLARGKSDFAWLSRKSADKITPW | |
| | NFDEIVDKESSAEAFINRMTNYDLYLPNQKVLPKHSLLYEKFTVYNELTKVKYKTEQGKTAFFDANMKQEIFDGVFKVYRKVTKDKLMDFLEKEFDEFRIVDLTGLDKENKVFNASYGT | |
| | YHDLCKILDKDFLDNSKNEKILEDIVLTLTLFEDREMIRKRLENYSDLLTKEQVKKLERRHYTGWGRLSAELIHGIRNKESRKTILDYLIDDGNSNRNFMQLINDDALSFKEEIAKAQV | |
| | IGETDNLNQVVSDIAGSPAIKKGILQSLKIVDELVKIMGHQPENIVVEMARENQFTKQGRRNSQQRLKGLTDSIKEFGSQILKEHPVENSQLQNDRLFLYYLQNGRDMYTGEELDIDYL | |
| | SQYDIDHIIPQAFIKDNSIDNRVLTSSKENRGKSDDVPSKDVVRKMKSYWSKLLSAKLITQRKFDNLTKAERGGLTDDDKAGFIKRQLVETRQITKHVARILDERFYTETDENNKKIRQ | |
| | VKIVTLKSNLVSNFRKEFELYKVREINDYHHAHDAYLNAVIGKALLGVYPQLEPEFVYGDYPHFHGHKENKATAKKFFYSNIMNFFKKDDVRTDRNGEIIWKKDEHISNIKKVLSYPQV | |
| | NIVKKVEEQTGGFSKESILPKGNSDKLIPRKTKKFYWDTKKYGGFDSPIVAYSILVIADIEKGKSKKLKTVKALVGVTIMEKMTFERDPVAFLERKGYRNVQEENIIKLPKYSLFKLEN | |
| | GRKRLLASARELQKGNEIVLPNHLGTLLYHAKNIHKVDEPKHLDYVDKHKDEFKELLDVVSNFSKKYTLAEGNLEKIKELYAQNNGEDLKELASSFINLLTFTAIGAPATFKFFDKNID | |
| | RKRYTSTTEILNATLIHQSITGLYETRIDLSKLGGD | |
| 268 | MKKPYSIGLDIGTNSVGWAVVTDDYKVPAKKMKVLGNTDKSHIKKNLLGALLFDSGNTAEDRRLKRTARRRYTRRRNRILYLQEIFSEEMGKVNDSFFHRLEDSFLVTEDKRGERHPIF | WP_002295753.1 |
| | GNLEEEVKYHENFPTIYHLRQYLADNPEKVDLRLVYLALAHIIKFRGHFLIEGKFDTRNNDVQRLFQEFLAVYDNTFENSSLQEQNVQVEEILTDKISKSAKKDRVLKLFPNEKSNGRF | [Streptococcus |
| | AEFLKLIVGNQADFKKHFELEEKAPLQFSKDTYEEELEVLLAQIGDNYAELFLSAKKLYDSILLSGILTVTDVSTKAPLSASMIQRYNEHQMDLAQLKQFIRQKLSDKYNEVFSDVSKD | mutans] |
| | GYAGYIDGKTNQEAFYKYLKGLLNKIEGSGYFLDKIEREDFLRKQRTFDNGSIPHQIHLQEMRAIIRRQAEFYPFLADNQDRIEKILTFRIPYYVGPLARGKSDFAWLSRKSADKITPW | |
| | NFDEIVDKESSAEAFINRMTNYDLYLPNQKVLPKHSLLYEKFTVYNELTKVKYKTEQGKTAFFDANMKQEIFDGVFKVYRKVTKDKLMDFLEKEFDEFRIVDLTGLDKENKVFNASYGT | |
| | YHDLCKILDKDFLDNSKNEKILEDIVLTLTLFEDREMIRKRLENYSDLLTKEQVKKLERRHYTGWGRLSAELIHGIRNKESRKTILDYLIDDGNSNRNFMQLINDDALSFKEEIAKAQV | |
| | IGETDNLNQVVSDIAGSPAIKKGILQSLKIVDELVKIMGHQPENIVVEMARENQFTKQGRRNSQQRLKGLTDSIKEFGSQILKEHPVENSQLQNDRLFLYYLQNGRDMYTGEELDIDYL | |
| | SQYDIDHIIPQAFIKDNSIDNRVLTSSKENRGKSDDVPSKDVVRKMKSYWSKLLSAKLITQRKFDNLTKAERGGLTDDDKAGFIKRQLVETRQITKHVARILDERFYTETDENNKKIRQ | |
| | VKIVTLKSNLVSNFRKEFELYKVREINDYHHAHDAYLNAVIGKALLGVYPQLEPEFVYGDYPHFHGHKENKATAKKFFYSNIMNFFKKDDVRTDKNGEIIWKKDEYISNIKKVLSYPQV | |
| | NIVKKVEEQTGGFSKESILPKGNSDKLIPRKTKKFYWDTKKYGGFDSPIVAYSILVIADIEKGKSKKLKTVKALVGVTIMEKMTFERDPIAFLERKGYRNVQEENIIKLPKYSLFKLEN | |
| | GRKRLLASARELQKGNEIVLPNHLGTLLYHAKNIHKVDEPKHLDYVDKHKDEFKELLDVVSNFSKKYTLAEGNLEKIKELYAQNNGEDLKELASSFINLLTFTAIGAPAAFKFFDKNID | |
| | RKRYTSTTEILNATLIHQSITGLYETRIDLSKLGGD | |
| 269 | MKKPYSIGLDIGTNSVGWAVVTDDYKVPAKKMKVLGNTDKSHIKKNLLGALLFDSGNTAEDRRLKRTTRRRYTRRRNRILYLQEIFSEEMGKVDDSFFHRLEDSFLVTEDKRGERHPIF | WP_002289641.1 |
| | GNLEEEVKYHENFPTIYHLRQYLADNPEKTDLRLVYLALAHIIKFRGHFLIEGKFDTRNNDVQRLFQEFLAVYDNTFENSSLQEQNVQVEEILTDKISKSAKKDRVLKLFPNEKSNGCF | [Streptococcus |
| | AEFLKLIVGNQADFKKHFELEEKAPLQFSKDTYEEELEVLLAQIGDNYAELFLSAKKLYDSILLSGILTVTDVSTKAPLSASMIQRYNEHQMDLTQLKQFIRQKLSDKYNEVFSDVSKD | mutans] |
| | GYAGYIDGKTNQEAFYKYLKGLLNKIEGSGYFLDKIEREDFLRKQRTFDNGSIPHQIHLQEMRAIIRRQAEFYPFLADNQDRIEKLLTFRIPYYVGPLASGKSDFAWLSRKSADKITPW | |
| | NFDEIVDKESSAEAFINRMTNYDLYLPNQKVLPKHSLLYEKFTVYNELTKVKYKTEQGKTAFFDANMKQEIFDGVFKVYRKVTKDKLMDFLEKEFDEFRIVDLTGLDKENKVFNASYGT | |
| | YHDLCKILDKDFLDNSKNEKILEDIVLTLTLFEDREMIRKRLENYSDLLTKEQVKKLERRHYTGWGRLSAELIHGIRNKESRKTILDYLIDDGNSNRNFMQLINDDALSFKEEIAKAQV | |
| | IGETDNLNQVVSDIAGSPAIKKGILQSLKIVDELVKIMGHQPENIVVEMARENQFTNQGRRNSQQRLKGLTDSIKEFGSQILKEHPVENSQLQNDRLFLYYLQNGRDMYTGEELDIDYL | |
| | SQYDIDHIIPQAFIKDNSIDNRVLTSSKENRGKSDDVPSKDVVRKMKSYWSKLLSAKLITQRKFDNLTKAERGGLTDDDKAGFIKRQLVETRQITKHVARILDERFNTETDENNKKIRQ | |
| | VKIVTLKSNLVSNFRKEFELYKVREINDYHHAHDAYLNAVIGKALLGVYPQLEPEFVYGDYPHFHGHKENKATAKKFFYSNIMNFFKKDDVRTDKNGEIIWKKDEHISNIKKVLSYPQV | |
| | NIVKKVEEQTGGFSKESILPKGNSDKLIPRKTKKFYWDTKKYGGFDSPIVAYSILVIADIEKGKSKKLKTVKALVGVTIMEKMTFERDPVAFLERKGYRNVQEENIIKLPKYSLFKLEN | |
| | GRKRLLASARELQKGNEIVLPNHLGTLLYHAKNIHKVDEPKHLDYVDKHKDEFKELLDVVSNFSKKYTLAEGNLEKIKELYAQNNGEDLKELASSFINLLTFTAIGAPATFKFFDKNID | |
| | RKRYTSTTEILNATLIHQSITGLYETRIDLSKLGGD | |
| 270 | MKKPYSIGLDIGTNSVGWAVVTDDYKVPAKKMKVLGNTDKSHIKKNLLGALLFDSGNTAEDRRLKRTTRRRYTRRRNRILYLQEIFSEEMGKVDDSFFHRLEDSFLVTEDKRGERHPIF | WP_024784894.1 |
| | GNLEEEVKYHENFPTIYHLRQYLADNPEKTDLRLVYLALAHIIKFRGHFLIEGKFDTRNNDVQRLFQEFLAVYDNTFENSSLQEQNVQVEEILTDKISKSAKKDRVLKLFPNEKSNGRF | [Streptococcus |
| | AEFLKLIVGNQADFKKHFELEEKAPLQFSKDTYEEELEVLLAQIGDNYAELFLSAKKLYDSILLSGILTVTDVSTKAPLSASMIQRYNEHQMDLTQLKQFIRQKLSDKYNEVFSDVSKD | mutans] |
| | GYAGYIDGKTNQEAFYKYLKGLLNKIEGSGYFLDKIEREDFLRKQRTFDNGSIPHQIHLQEMRAIIRRQAEFYPFLADNQDRIEKLLTFRIPYYVGPLASGKSDFAWLSRKSADKITPW | |
| | NFDEIVDKESSAEAFINRMTNYDLYLPNQKVLPKHSLLYEKFTVYNELTKVKYKTEQGKTAFFDANMKQEIFDGVFKVYRKVTKDKLMDFLEKEFDEFRIVDLTGLDKENKVFNASYGT | |
| | YHDLCKILDKDFLDNSKNEKILEDIVLTLTLFEDREMIRKRLENYSDLLTKEQVKKLERRHYTGWGRLSAELIHGIRNKESRKTILDYLIDDGNSNRNFMQLINDDALSFKEEIAKAQV | |
| | IGETDNLNQVVSDIAGSPAIKKGILQSLKIVDELVKIMGHQPENIVVEMARENQFTNQGRRNSQQRLKGLTDSIKEFGSQILKEHPVENSQLQNDRLFLYYLQNGRDMYTGEELDIDYL | |
| | SQYDIDHIIPQAFIKDNSIDNRVLTSSKENRGKSDDVPSKDVVRKMKSYWSKLLSAKLITQRKFDNLTKAERGGLTDDDKAGFIKRQLVETRQITKHVARILDERFNTETDENNKKIRQ | |
| | VKIVTLKSNLVSNFRKEFELYKVREINDYHHAHDAYLNAVIGKALLGVYPQLEPEFVYGDYPHFHGHKENKATAKKFFYSNIMNFFKKDDVRTDKNGEIIWKKDEHISNIKKVLSYPQV | |
| | NIVKKVEEQTGGFSKESILPKGNSDKLIPRKTKKFYWDTKKYGGFDSPIVAYSILVIADIEKGKSKKLKTVKALVGVTIMEKMTFERDPVAFLERKGYRNVQEENIIKLPKYSLFKLEN | |
| | GRKRLLASARELQKGNEIVLPNHLGTLLYHAKNIHKVDEPKHLDYVDKHKDEFKELLDVVSNFSKKYTLAEGNLEKIKELYAQNNGEDLKELASSFINLLTFTAIGAPATFKFFDKNID | |
| | RKRYTSTTEILNATLIHQSITGLYETRIDLSKLGGD | |
| 271 | MKKPYSIGLDIGTNSVGWAVVTDDYKVPAKKMRVFGDTDRSHIKKNLLGTLLFDDGNTAESRRLKRTARRRYTRRRNRILYLQEIFTESMNEIDESFFHRLDDSFLVPEDKRGSKYPIF | WP_002897477.1 |
| | ATLQEEKEYHKQFPTIYHLRKQLADSKEKSDVRLIYLALAHMIKYRGHFLYEETFDIKNNDIQKIFNEFINIYDNTFEGSSLSGQNAQVEAIFTDKISKSAKRERVLKLFPDEKSTGLF | [Streptococcus |
| | SEFLKLIVGNQADFKKHFDLEEKAPLQFSKDTYDEELENLLGQIGDDFADLFLIAKKLYDAILLSGILTVTDPSTKAPLSASMIERYENHQKDLAALKQFIKNNLPEKYVEVFSDQSKD | sanguinis] |
| | GYAGYIDGKTTQEAFYKYIKNLLSKFEGADYFLDKIEREDFLRKQRTFDNGSIPHQIHLQEMNAILRRQGEHYPFLKENREKIEKILTFRIPYYVGPLARDNRDFSWLTRNSDEPIRPW | |
| | NFEEVVDKARSAEDFIHRMTNYDLYLPEEKVLPKHSLLYETFAVYNELTKVKFIAEGLRDYQFLDSGQKKQIVNQLFKEKRKVTEKDIIHYLHNVDGYDGIELKGIEKQFNANLSTYHD | |
| | LLKITKDKEFMDDPKNEEILENIVHTLTIFEDREMIKQRLAQYDTLFDEKVIKALTRRHYTGWGKLSAKLINGIRDKQSGKTILDYLIDDDKINRNFMQLINDDGLSFKEIIQKAQVVG | |
| | KTDDVKQVVQELPGSPAIKKGILQSIKIVDELVKVMGYALESIVIEMARENQTTARGKKNSQQRYKRIEDALKNLAPGLDSNILKENPTDNIQLKNDRLFLYYLQNGKDMYTGKPLDIN | |
| | QLSSYDIDHIIPQAFIKDDSIDNRVLTSSKDNRGKSDNVPSLEVVQKRKAFWQQLLDSKLISERKFNNLTKAERGGLDERDKVGFIRRQLVETQQITKNVAQILDARFNTEVKEKNQKI | |
| | RTVKIITLKSNLVSNFRKEFGLYKVREINNYHHAHDAYLNAVVAKAILKKYPKLEPEFVYGDYQKYDLKKYISRFKPSKEIEKATEKYFFYSNLLNFFKEEVLYADGTIRKRENIEYSK | |
| | DTGEIAWDKEKDFATIKKVLSYPQVNIVKKREVQTGGFSKESILPKGNSDKLIPRKTKDILWDTTKYGGFDSPVIAYSILLIADIEKGKAKKLKTVKTLVGITIMEKAAFEENPITFLE | |
| | NKGYHNVRKENILCLPKYSLFELENGRRRLLASAKELQKGNEIVLPVCLTTLLYHSKNLHKLDEPEHLEYIQKHRNEFKDLLNLVSEFSQKYILAEANLEKIKDLYADNEQADIEILAN | |
| | SFINLLTFTALGAPAAFKFFGKDVDRKRYTTVSEILNATLIHQSITGLYETRIDLSKLGEE | |
| 272 | MKKPYSIGLDIGTNSVGWAVVTDDYKVPDKKMKVLGNTDKSHIKKNLLGALLFDSGNTAEDRRLKRTARRRYTRRRNRILYLQEIFSEEMGKVDDSFFHRLEDSFLVTEDKRGERHPIF | WP_014677909.1 |
| | GNLEEEVKYHENFPTIYHLRQYLADNPEKTDLRLVYLALAHIIKFRGHFLIEGKFDTRNNDVQRLFQEFLAVYDNTFENSSLQEQNVQVEEILTDKISKSAKKDRVLKLFPNEKSNGRF | [Streptococcus |
| | AEFLKLIVGNQADFKKHFELEEKAPLQFSKDIYEEELEVLLAQIGDNYAELFLSAKKLYDSILLSGILTVTDVSTKAPLSASMIQRYNEHQMDLAQLKQFIRQKLSDKYNEVFSDVSKD | mutans] |
| | GYAGYIDGKTNQEAFYKYLKGLLNKIEGSGYFLDKIEREDFLRKQRTFDNGSIPHQIHLQEMRAIIRRQAEFYPFLADNQDRIEKILTFRIPYYVGPLARGKSDFAWLSRKSADKITPW | |
| | NFDEIVDKESSVEAFINRMTNYDLYLPNQKVLPKHSLLYEKFTVYNELTKVKYKTEQGKTAFFDANMKQEIFDGVFKVYRKVTKDKLMDFLEKEFDEFRIVDLTGLDKENKAFNASYGT | |
| | YHDLRKILDKDFLDNSKNEKILEDIVLTLTLFEDREMIRKRLKNYSDLLTKEQLKKLERRHYTGWGRLSAELIHGIRNKESRKTILDYLIDDGNSNRNFMQLINDDALSFKEEIAKAQV | |
| | IGETDNLNQVVSDIAGSPAIKKGILQSLKIVDELVKIMGHQPENIVVEMARENQFTNQGRRNSQQRLKGLTDSIKEFGSQILKEHPVENSQLQNDRLFLYYLQNGRDMYTGEELDIDYL | |
| | SQYDIDHIIPQAFIKDNSIDNRVLTSSKENRGKSDDVPSKDVVRKMKSYWSKLLSAKLITQRKFDNLTKAERGGLTDDDKAGFIKRQLVETRQITKHVARILDERFYTETDENNKKIRQ | |
| | VKIVTLKSNLVSNFRKEFELYKVREINDYHHAHDAYLNAVIGKALLGVYPQLEPEFVYGDYPHFHGHKENKATAKKFFYSNIMNFFKKDDVRTDKNGEIIWKKDEHISNIKKVLSYPQV | |
| | NIVKKVEEQTGGFSKESILPKGNSDKLIPRKTKKFYWDTKKYGGFDSPIVAYSILVIADIEKGKSKKLKTVKALVGVTIMEKMTFERDPVAFLERKGYRNVQEENIIKLPKYSLFKLEN | |
| | GRKRLLASARELQKGNEIVLPNHLGTLLYHAKNIHKVDEPKHLDYVDKHKDEFKELLDVVSNFSKKYTLAEGNLEKIKELYAQNNGEDLKELASSFINLLTFTAIGAPATFKFFDKNID | |
| | RKRYTSTTEILNATLIHQSITGLYETRIDLSKLGGD | |
| 273 | MKKPYSIGLDIGTNSVGWAVVTDDYKVSAKKMKVLGNTDKSHIKKNLLGALLFDSGNTAEDRRLKRTARRRYTRRRNRILYLQEIFAEEMSKVDDSFFHRLEDSFLVTEDKRGERHPIF | WP_002287255.1 |
| | GNLEEEVKYHENFPTIYHLRQYLADNPEKVDLRLVYLALAHIIKFRGHFLIEGKFDTRNNDVQRLFQEFLAVYDNTFENSSLQEQNVQVEEILTDKISKSAKKDRVLKLFPNEKSNGRF | [Streptococcus |
| | AEFLKLIVGNQADFKKHFELEEKAPLQFSKDTYEEELEVLLAQIGDNYAELFLSAKKLYDSILLSGILTVTDVSTKAPLSASMIQRYNEHQMDLAQLKQFIRQKLSDKYNEVFSDVSKD | mutans] |
| | GYAGYIDGKTNQEAFYKYLKGLLNKIEGSGYFLDKIEREDFLRKQRTFDNGSIPHQIHLQEMRAIIRRQAEFYPFLADNQDRIEKILTFRIPYYVGPLARGKSDFAWLSRKSADKITPW | |
| | NFDEIVDKESSAEAFINRMTNYDLYLPNQKVLPKHSLLYEKFTVYNELTKVKYKTEQGKTAFFDANMKQEIFDGVFKVYRKVTKDKLMDFLEKEFDEFRIVDLTGLDKENKAFNASYGT | |
| | YHDLRKILDKDFLDNSKNEKILEDIVLTLTLFEDREMIRKRLENYSDLLTKEQVKKLERRHYTGWGRLSAELIHGIRNKESRKTILDYLIDDGNSNRNFMQLINDDALSFKEEIAKAQV | |
| | IGETDNLNQVVSDIAGSPAIKKGILQSLKIVDELVKIMGHQPENIVVEMARENQFTNQGRRNSQQRLKGLTDSIKEFGSQILKEHPVEHSQLQNDRLFLYYLQNGRDMYTGEELDIDYL | |
| | SQYDIDHIIPQAFIKDNSIDNRVLTSSKENRGKSDDVPSKNVVRKMKSYWSKLLSAKLITQRKFDNLTKAERGGLTDDDKAGFIKRQLVETRQITKHVARILDERFHTETDENNKKIRQ | |
| | VKIVTLKSNLVSNFRKEFELYKVREINDYHHTHDAYLNAVIGKALLGVYPQLEPEFVYGDYPHFHGHKENKATAKKFFYSNIMNFFKKDDVRTDKNGEIIWKKDEHISNIKKVLSYPQV | |
| | NIVKKVEEQTGGFSKESILPKGNSDKLIPRKTKKFYWDTKKYGGFDSPIVAYSILVIADIEKGKSKKLKTVKALVGVTIMEKMTFERDPVAFLERKGYRNVQEENIIKLPKYSLFKLEN | |
| | GRKRLLASARELQKGNEIVLPNHLGTLLYHAKNIHKVDEPKHLDYVDKHKDEFKELLDVVSNFSKKYTLAEGNLEKIKELYAQNNGEDLKELASSFINLLTFTAIGAPATFKFFDKNID | |
| | RKRYTSTTEILNATLIHQSITGLYETRIDLSKLGGD | |
| 274 | MKKPYSIGLDIGTNSVGWSVVTDDYKVPAKKMKVLGNTDKSHIEKNLLGALLFDSGNTAEDRRLKRTARRRYTRRRNRILYLQEIFSEEMGKVDDSFFHRLEDSFLVTEDKRGERHPIF | WP_002282906.1 |
| | GNLEEEVKYHENFPTIYHLRQYLADNPEKVDLRLVYLALAHIIKFRGHFLIEGKFDTRNNDVQRLFQEFLAVYDNTFENSSLQEQNVQVEEILTDKISKSAKKDRVLKLFPNEKSNGRF | [Streptococcus |
| | AEFLKLIVGNQADFKKHFELEEKAPLQFSKDTYEEELEVLLAQIGDNYAELFLSAKKLYDSILLSGILTVTDVGTKAPLSASMIQRYNEHQMDLAQLKQFIRQKLSDKYNEVFSDVSKD | mutans] |
| | GYAGYIDGKTNQEAFYKYLKGLLNKIEGSGYFLDKIEREDFLRKQRTFDNGSIPHQIHLQEMRAIIRRQAEFYPFLADNQDRIEKLLTFRIPYYVGPLARGKSDFAWLSRKSADKITPW | |
| | NFDEIVDKESSAEAFINRMTNYDLYLPNQKVLPKHSLLYEKFTVYNELTKVKYKTEQGKTAFFDANMKQEIFDGVFKVYRKVTKDKLMDFLEKEFDEFRIVDLTGLDKENKVFNASYGT | |
| | YHDLCKILDKDFLDNSKNEKILEDIVLTLTLFEDREMIRKRLENYSDLLTKEQVKKLERRHYTGWGRLSAELIHGIRNKESRKTILDYLIDDGNSNRNFMQLINDDALSFKEEIAKAQV | |
| | IGETDNLNQVVSDIAGSPAIKKGILQSLKIVDELVKIMGHQPENIVVEMARENQFTNQGRRNSQQRLKGLTDSIKEFGSQILKEHPVENSQLQNDRLFLYYLQNGRDMYTGEELDIDYL | |
| | SQYDIDHIIPQAFIKDNSIDNRVLTSSKENRGKSDDVPSKDVVRKMKSYWSKLLSAKLITQRKFDNLTKAERGGLTDDDKAGFIKRQLVETRQITKHVARILDERFNTETDENNKKIRQ | |
| | VKIVTLKSNLVSNFRKEFELYKVREINDYHHAHDAYLNAVIGKALLGVYPQLEPEFVYGDYPHFHGHKENKATAKKFFYSNIMNFFKKDDVRIDKNGEIIWKKDEHISNIKKVLSYPQV | |
| | NIVKKVEEQTGGFSKESILPKGNSDKLIPRKTKKFYWDTKKYGGFDSPIVAYSILVIADIEKGKSKKLKTVKALVGVTIMEKMTFERDPVAFLERKGYRNVQEENIIKLPKYSLFKLEN | |
| | GRKRLLASARELQKGNEIVLPNHLGTLLYHAKNIHKVDEPKHLDYVDKHKDEFKELLDVVSNFSKKYTLAEGNLEKIKELYAQNNGEDLKELASSFINLLTFTAIGAPATFKFFDKNID | |
| | RKRYTSTTEILNATLIHQSITGLYETRIDLSKLGGD | |
| 275 | MKKPYTIALDIGTNSVGWVVVTDDYRVPTKKMKVLGNTERKTIKKNLIGALLFDSGDTAEGTRLKRTARPRYTRRKNRLRFLKEIFTEEMAKVDDGFFQRLEDSFYVLEDKEGNKHPIF | WP_037581760.1 |
| | ANLADEVAYHKKYPTIYHLRKELVDNPQKADLRLIYLAVAHIIKFRGHFLIEGTLSSKNNNLQKSFDHLVDTYNLLFEEQRLLTEGINAKELLSAALSKSKRLENLISLIPGQKKTGIF | [Streptococcus |
| | GNIIALSLGLTPNFKANFGLSKDVKLQLAKDTYADDLDSLLAQIGDQYADLFLAAKNLSDAILLSDILTESDEITRAPLSASMVKRYREHHKDLVTLKTLIKDQLPEKYQEIFLDKTKN | egui] |
| | GYAGYIEGQVSQEEFYKYLKPILARLDGSEPLLLKIDREDFLRKQRTFDNGSIPHQIHLEELHAILRRQEVFYPFLKDNRKKIESLLTFRIPYYVGPLARGHSRFAWVKRKFDGAIRPW | |
| | NFEEIVDEEASAQIFIEKMTKNDLYLPNEKVLPKHSLLYETFTVYNELTKVKYATEGMTRPQFLSADQKQAIVDLLFKTNRKVTVKQLKENYFKKIECWDSVEITGVEDSFNASLGTYH | |
| | DLLKIIQDKDFLDNPDNQKIIEDIILTLTLFEDKKMISKRLDQYAHLFDKVVLNKLERHHYTGWGRLSGKLINGIRDKQSGKTILDFLKADGFANRNFMQLIHDSELSFIDEIAKAQVI | |
| | GKTEYSKDLVGNLAGSPAIKKGISQTIKIVDELVKIMGYLPQQIVIEMARENQTTAQGIKNARQRMRKLEETAKKLGSNILKEHPVDNSQLQNDKRYLYYLQNGKDMYTGDDLDIDYLS | |
| | SYDIDHIIPQSFIKNNSIDNKVLTSQGANRGKLDNVPSEAIVRKMKGYWQSLLRAGAISKQKFDNLTKAERGGLTQVDKAGFIQLQLVETRQITKHVAQILDSRFNTEFDDHNKRIRKV | |
| | HIITLKSKLVSDFRKEFGLYKIRDINHYHHAHDAYLNAVVAKAILGKYPQLAPEFVYGDYPKYNSFKERQKATQKTLFYSNILKFFKDQESLHVNSDGEEIWNANKHLPIIKNVLSIPQ | |
| | VNIVKKTEVQTGGFYKESILSKGNSDKLIPRKNNWDTRKYGGFDSPTVAYSVLVIAKMEKGKAKVLKPVKEMVGITIMERIAFEENPVVFLEAKGYREIQEHLIIKLPKYSLFELENGR | |
| | RRLLASASELQKGNELFLPVDYMTFLYLAAHYHELTGSSEDVLRKKYFVERHLHYFDDIIQMINDFAERHILASSNLEKINHTYHNNSDLPVNERAENIINVFTFVALGAPAAFKFFDA | |
| | TIDRKRYTSTKEVLNATLIHQSVTGLYETRIDLSQLGEN | |
| 276 | MKKPYTIALDIGTNSVGWVVVTDDYRVPTKKMKVLGNTERKTIKKNLIGALLFDSGDTAEGTRLKRTARRRYTRRKNRLRYLKEIFTEEMAKVDDGFFQRLEDSFYVLEDKEGNKHPIF | WP_012515931.1 |
| | ANLADEVAYHKKYPTIYHLRKELVDNPQKADLRLIYLAVAHIIKFRGHFLIEGTLSSKNNNLQKSFDHLVDTYNLLFEEQRLLTEGINAKELLSAALSKSKRLENLISLIPGQKKTGIF | [Streptococcus |
| | GNIIALSLGLTPNFKANFGLSKDVKLQLAKDTYADDLDSLLAQIGDQYADLFLAAKNLSDAILLSDILTESDEITRAPLSASMVKRYREHHKDLVTLKTLIKDQLPEKYQEIFLDKTKN | egui] |
| | GYAGYIEGQVSQEEFYKYLKPILARLDGSEPLLLKIDREDFLRKQRTFDNGSIPHQIHLEELHAILRRQEVFYPFLKDNRKKIESLLTFRIPYYVGPLARGHSRFAWVKRKFDGAIRPW | |
| | NFEEIVDEEASAQIFIEKMTKNDLYLPNEKVLPKHSLLYETFTVYNELTKVKYATEGMTRPQFLSADQKQAIVDLLFKTNRKVTVKQLKENYFKKIECWDSVEITGVEDSFNASLGTYH | |
| | DLLKIIQDKDFLDNPDNQKIIEDIILTLTLFEDKKMISKRLDQYAHLFDKVVLNKLERHHYTGWGRLSGKLINGIRDKQSGKTILDFLKADGFANRNFMQLIHDSELSFIDEIAKAQVI | |
| | GKTEYSKDLVGNLAGSPAIKKGISQTIKIVDELVKIMGYLPQQIVIEMARENQTTAQGIKNARQRMRKLEETAKKLGSNILKEHPVDNSQLQNDKRYLYYLQNGKDMYTGDDLDIDYLS | |
| | SYDIDHIIPQSFIKNNSIDNKVLTSQGANRGKLDNVPSEAIVRKMKGYWQSLLRAGAISKQKFDNLTKAERGGLTQVDKAGFIQRQLVETRQITKHVAQILDSRFNTEFDDHNKRIRKV | |
| | HIITLKSKLVSDFRKEFGLYKIRDINHYHHAHDAYLNAVVAKAILGKYPQLAPEFVYGDYPKYNSFKERQKATQKMLFYSNILKFFKDQESLHVNSDGEEIWNANKHLPIIKNVLSIPQ | |
| | VNIVKKTEVQTGGFYKESILSKGNSDKLIPRKNNWDTRKYGGFDSPTVAYSVLVIAKMEKGKAKVLKPVKEMVGITIMERTAFEENPVVFLEARGYREIQEHLIIKLPKYSLFELENGR | |
| | RRLLASASELQKGNELFLPVDYMTFLYLAAHYHELTGSSEDVLRKKYFVDRHLHYFDDIIQMINDFAERHILASSNLEKINHTYHNNSDLPVNERAENIINVFTFVALGAPAAFKFFDA | |
| | TIDRKRYTSTKEVLNATLIHQSVTGLYETRIDLSQLGEN | |
| 277 | MKKPYTIALDIGTNSVGWVVVTDDYRVPTKKMKVLGNTERKTIKKNLIGALLFDSGDTAEGTRLKRTARRRYTRRKNRLRYLKEIFTEEMAKVDDGFFQRLEDSFYVLEDKEGNKHPIF | WP_021320964.1 |
| | ANLADEVAYHKKYPTIYHLRKELVDNPQKADLRLIYLAVAHIIKFRGHFLIEGTLSSKNNNLQKSFDHLVDTYNLLFEEQRLLTEGINAKELLSAALSKSKRLENLISLIPGQKKTGIF | [Streptococcus |
| | GNIIALSLGLTPNFKANFGLSKDVKLQLAKDTYADDLDSLLAQIGDQYADLFLAAKNLSDAILLSDILTESDEITRAPLSASMVKRYREHHKDLVTLKTLIKDQLPEKYQEIFLDKTKN | egui] |
| | GYAGYIEGQVSQEEFYKYLKPILARLDGSEPLLLKIDREDFLRKQRTFDNGSIPHQIHLEELHAILRRQEVFYPFLKDNRKKIESLLTFRIPYYVGPLARGHSRFAWVKRKFDGAIRPW | |
| | NFEEIVDEEASAQIFIEKMTKNDLYLPNEKVLPKHSLLYETFTVYNELTKVKYATEGMTRPQFLSADQKQAIVDLLFKTNRKVTVKQLKENYFKKIECWDSVEITGVEDSFNASLGTYH | |
| | DLLKIIQDKDFLDNPDNQKIIEDIILTLTLFEDKKMISKRLDQYAHLFDKVVLNKLERHHYTGWGRLSGKLINGIRDKQSGKTILDFLKADGFANRNFMQLIHDSELSFIDEIAKAQVI | |
| | GKTEYSKDLVGNLASSPAIKKGISQTIKIVDELVKIMGYLPQQIVIEMARENQTTAQGIKNARQRMRKLEETAKKLGSNILKEHPVDNSQLQNDKRYLYYLQNGKDMYTGDDLDIDYLS | |
| | SYDIDHIIPQSFIKNNSIDNKVLTSQGANRGKLDNVPSEAIVRKMKGYWQSLLRAGAISKQKFDNLTKAERGGLTQVDKAGFIQRQLVETRQITKHVAQILDSRFNTEFDDHNKRIRKV | |
| | HIITLKSKLVSDFRKEFGLYKIRDINHYHHAHDAYLNAVVAKAILGKYPQLAPEFVYGDYPKYNSFKERQKATQKTLFYSNILKFFKDQESLHVNSDGEEIWNANKHLPIIKNVLSIPQ | |
| | VNIVKKTEVQTGGFYKESILSKGNSDKLIPRKNNWDTRKYGGFDSPTVAYSVLVIAKMEKGKAKVLKPVKEMVGITIMERIAFEENPVVFLEAKGYREIQEHLIIKLPKYSLFELENGR | |
| | RRLLASASELQKGNELFLPVDYMTFLYLAAHYHELTGSSEDVLRKKYFVERHLHYFDDIIQMINDFAERHILASSNLEKINHTYHNNSDLPINERAENIINVFTFVALGAPAAFKFFDA | |
| | TIDRKRYTSTKEVLNATLIHQSVTGLYETRIDLSQLGEN | |
| 278 | MKKPYTIGLDIGTNSVGWAALTDQYDLVKRKMKVAGNSEKKQIKKNLWGVRLVDEGKTAAHRRVNRTTRRRIERRRNRISYLQEIFTAEMFEVDANFFYRLEDSFYIESEKRQSRHPFF | WP_046323366.1 |
| | ATIEEEVAYHENYRTIYHLREKLVNSSDKADLRLVYLALAHIIKYRGNFLIEGKLDTKNTSVDEVFKQFIKTYNQVFASDIEEGSLTRIEENNEVAKIFSEKLTKREKLDKILNLYPNE | [Listeria |
| | KSTDLFAQFISLIIGSKGNFKKFFNLTEKTDIECAKDSYEEDLEVLLARVGDEYAEIFVAAKNAYNAVVLSSIITVSNTETKAKLSASMIERFDKHDKDLKRMKAFFKVRLPENFNEVF | seeligeri] |
| | NDVEKDGYAGYIEGKTKQEAFYKYMKKMLEHVEGADYFINQIEEENFLRKQRTFDNGAIPHQLHLEELEAILHQQAKYYPFLKVDYEKIKSLVTFRIPYFVGPLANGQSEFSWLTRKAD | |
| | GEIRPWNIEEKVDFGKSAIDFIEKMTNKDTYLPKENVLPKHSMCYQKYMVYNELTKIRYTDDQGKTHYFSGQEKQQIFNDLFKQKRKVKKKDLELFLYNMNHVESPTVEGVEDAFNSSF | |
| | TTYHDLQKVGVPQEILDDPLNTEMLEEIIKILTVFEDKRMINERLQEFSNVLDEAVLKKLERRHYTGWGRLSAKLLIGIRDKESHLTILDYLMNDDKHNRNLMQLINDSNLSFKSIIEK | |
| | EQVSTADKDIQSIVADLAGSPAIKKGILQSLKIVDELVGIMGYPPQTIVVEMARENQTTGKGKNNSKPRFTSLEKAIKELGSQILKEHPTDNQGLKNDRLYLYYLQNGKDMYTGQELDI | |
| | HNLSNYDIDHVVPQSFITDNSIDNRVLASSAANREKGDNVPSLEVVRKRKVYWEKLYQAKLMSKRKFDYLTKAERGGLTEADKARFIHRQLVETRQITKNVANILHQRFNCKKDESGNV | |
| | IEQVRIVTLKAALVSQFRKQFQLYKVREVNDYHHAHDAYLNCVVANTLLKVYPQLEPEFVYGDYHQFDWFKANKATAKKQFYTNIMLFFAKKDRIIDENGEILWDKKYLDTIKKVLNYR | |
| | QMNIVKKTEIQKGEFSNATANPKGNSSKLIPRKADWDPIKYGGFDGSNMAYAIVIEHEKRKKKTVIKKELIQINIMERTAFEKDQKEFLEGKGYRNPKVITKIPKYTLYECENGRRRML | |
| | GSANEAQKGNQMVLPNHLMTLLYHAKNCEASDGKSLAYIESHREMFAELLDSISEFASRYTLADANLEKINTIFEQNKSGDVKVIAQSFVNLLEFNAMGAPASFKYFETNIERKRYNNL | |
| | KELLNATIIYQSITGLYEARKRLDD | |
| 279 | MKKPYTIGLDIGTNSVGWAVLTDQYDLVKRKMKIAGDSEKKQIKKNFWGVRLFDEGQTAADRRMARTARRRIERRRNRISYLQGIFAEEMSKTDANFFCRLSDSFYVDNEKRNSRHPFF | WP_010991369.1 |
| | ATIEEEVEYHKNYPTIYHLREELVNSSEKADLRLVYLALAHIIKYRGNFLIEGALDTQNTSVDGIYKQFIQTYNQVFASGIEDGSLKKLEDNKDVAKILVEKVTRKEKLERILKLYPGE | [Listeria |
| | KSAGMFAQFISLIVGSKGNFQKPFDLIEKSDIECAKDSYEEDLESLLALIGDEYAELFVAAKNAYSAVVLSSIITVAETETNAKLSASMIERFDTHEEDLGELKAFIKLHLPKHYEEIF | innocua] |
| | SNTEKHGYAGYIDGKTKQADFYKYMKMTLENIEGADYFIAKIEKENFLRKQRTFDNGAIPHQLHLEELEAILHQQAKYYPFLKENYDKIKSLVTFRIPYFVGPLANGQSEFAWLTRKAD | |
| | GEIRPWNIEEKVDFGKSAVDFIEKMTNKDTYLPKENVLPKHSLCYQKYLVYNELTKVRYINDQGKTSYFSGQEKEQIFNDLFKQKRKVKKKDLELFLRNMSHVESPTIEGLEDSFNSSY | |
| | STYHDLLKVGIKQEILDNPVNTEMLENIVKILTVFEDKRMIKEQLQQFSDVLDGVVLKKLERRHYTGWGRLSAKLLMGIRDKQSHLTILDYLMNDDGLNRNLMQLINDSNLSFKSIIEK | |
| | EQVTTADKDIQSIVADLAGSPAIKKGILQSLKIVDELVSVMGYPPQTIVVEMARENQTTGKGKNNSRPRYKSLEKAIKEFGSQILKEHPTDNQELRNNRLYLYYLQNGKDMYTGQDLDI | |
| | HNLSNYDIDHIVPQSFITDNSIDNLVLTSSAGNREKGDDVPPLEIVRKRKVFWEKLYQGNLMSKRKFDYLTKAERGGLTEADKARFIHRQLVETRQITKNVANILHQRFNYEKDDHGNT | |
| | MKQVRIVTLKSALVSQFRKQFQLYKVRDVNDYHHAHDAYLNGVVANTLLKVYPQLEPEFVYGDYHQFDWFKANKATAKKQFYTNIMLFFAQKDRIIDENGEILWDKKYLDTVKKVMSYR | |
| | QMNIVKKTEIQKGEFSKATIKPKGNSSKLIPRKTNWDPMKYGGLDSPNMAYAVVIEYAKGKNKLVFEKKIIRVTIMERKAFEKDEKAFLEEQGYRQPKVLAKLPKYTLYECEEGRRRML | |
| | ASANEAQKGNQQVLPNHLVTLLHHAANCEVSDGKSLDYIESNREMFAELLAHVSEFAKRYTLAEANLNKINQLFEQNKEGDIKAIAQSFVDLMAFNAMGAPASFKFFETTIERKRYNNL | |
| | KELLNSTIIYQSITGLYESRKRLDD | |
| 280 | MKKPYTIGLDIGTNSVGWAVLTDQYDLVKRKMKIAGDSEKKQIKKNFWGVRLFDEGQTAADRRMARTARRRIERRRNRISYLQGIFAEEMSKTDANFFCRLSDSFYVDNEKRNSRHPFF | WP_033838504.1 |
| | ATIEEEVEYHKNYPTIYHLREELVNSSEKADLRLVYLALAHIIKYRGNFLIEGALDTQNTSVDGIYKQFIQTYNQVFASGIEDGSLKKLEDNKDVAKILVEKVTRKEKLERILKLYPGE | [Listeria |
| | KSAGMFAQFISLIVGSKGNFQKPFDLIEKSDIECAKDSYEEDLESLLALIGDEYAELFVAAKNAYSAVVLSSIITVAETETNAKLSASMIERFDTHEEDLGELKAFIKLHLPKHYEEIF | innocua9 |
| | SNTEKHGYAGYIDGKTKQADFYKYMKMTLENIEGADYFIAKIEKENFLRKQRTFDNGAIPHQLHLEELEAILHQQAKYYPFLKENYDKIKSLVTFRIPYFVGPLANGQSEFAWLTRKAD | |
| | GEIRPWNIEEKVDFGKSAVDFIEKMTNKDTYLPKENVLPKHSLCYQKYLVYNELTKVRYINDQGKTSYFSGQEKEQIFNDLFKQKRKVKKKDLELFLRNMSHVESPTIEGLEDSFNSSY | |
| | STYHDLLKVGIKQEILDNPVNTEMLENIVKILTVFEDKRMIKEQLQQFSDVLDGVVLKKLERRHYTGWGRLSAKLLMGIRDKQSHLTILDYLMNDDGLNRNLMQLINDSNLSFKSIIEK | |
| | EQVTTADKDIQSIVADLAGSPAIKKGILQSLKIVDELVSVMGYPPQTIVVEMARENQTTGKGKNNSRPRYKSLEKAIKEFGSQILKEHPTDNQELRNNRLYLYYLQNGKDMYTGQDLDI | |
| | HNLSNYDIDHIVPQSFITDNSIDNLVLTSSAGNREKGDDVPPLEIVRKRKVFWEKLYQGNLMSKRKFDYLTKAERGGLTEADKARFIHRQLVETRQITKNVANILHQRFNYEKDDHGNT | |
| | MKQVRIVTLKSALVSQFRKQFQLYKVRDVNDYHHAHDAYLNGVVANTLLKVYPQLEPEFVYGDYHQFDWFKANKATAKKQFYTNIMLFFAQKDRIIDENGEILWDKKYLDTVKKVMSYR | |
| | QMNIVKKTEIQKGEFSKATIKPKGNSSKLISRKTNWDPMKYGGLDSPNMAYAVVIEYAKGKNKLVFEKKIIRVTIMERKAFEKDEKAFLEEQGYRQPKVLAKLPKYTLYECEEGRRRML | |
| | ASANEAQKGNQQVLPNHLVTLLHHVANCEVSDGKSLDYIESNREMFAELLAHVSEFAKRYTLAEANLNKINQLFEQNKEGDIKAIAQSFVDLMAFNAMGAPASFKFFETTIERKRYNNL | |
| | KELLNSTIIYQSITGLYESRKRLDD | |
| 281 | MKKPYTIGLDIGTNSVGWAVLTDQYDLVKRKMKISGDSEKKQIKKNFWGVRLFEKGETAAKRRMSRTARRRIERRRNRISYLQEIFAIQMNEVDDNFFNRLKESFYAESDKKYNRHPFF | WP_003733029.1 |
| | GTVEEEVAYYKDFPTIYHLRKELIDSQKKADLRLVYLALAHIIKYRGHFLIEGALDTKNTSIDEMFKQFLQIYNQVFANDIEEASLKKTEKNQEVAQILAEKFTRKDKLDKILSLYPGE | [Listeria |
| | KTTGVFAQFVNIIVGSTGKFKKHFNLHEKKDINCAEDTYDTDLESLLAIIGDEFAEVFVAAKNAYNAVVLSNIITVTDSTTRAKLSASLIERFENHKEDLKKMKRFVRTYLPEKYDEIF | monocytogenes] |
| | DDTEKHGYAGYISGKTKQADFYKYMKATLEKIEGADYFIAKIEEENFLRKQRTFDNGVIPHQLHLEELEAILHQQAKYYPFLREDYEKIKSLVTFRIPYFVGPLAKGQSEFAWLTRKAD | |
| | GEIRPWNIEEKVDFGKSAVDFIEKMTNKDTYLPKENVLPKHSLCYQKYMVYNELTKVRYIDDQGKTNYFSGQEKQQIFNDLFKQKRKVKKKDLELFLRNINQIESPTIEGLEDSFNASY | |
| | ATYHDLLKVGMKQEILDNPLNTEMLEDIVKILTVFEDKRMIKEQLQQFSDVLDGTVLKKLERRHYTGWGRLSAKLLVGIRDKQSHLTILDYLMNDDGLNRNLMQLINDSNLSFKSIIEK | |
| | EQVSTTDKDLQSIVAELAGSPAIKKGILQSLKIVDELVSVMGYPPQTIVVEMARENQTTNKGKNNSKPRYKSLEKAIKEFGSQILKEHPTDNQELKNNRLYLYYLQNGKDMYTGQELDI | |
| | HNLSNYDIDHIVPQSFITDNSVDNLVLTSSAGNREKGDNVPPLEIVQKRKIFWEKLYQGNLMSKRKFDYLTKAERGGLTEADKARFIHRQLVETRQITKNVANILHQRFNYKTDGNKDT | |
| | METVRIVTLKSALVSQFRKQFQFYKVREVNDYHHAHDAYLNGVVANTLLKVYPQLEPEFVYGEYHQFGWFKANKATAKKQFYTNIMLFFAQKDRIIDENGEILWDKRYLETVKKVLGYR | |
| | QMNIVKKTEIQKGEFSNVTPNPKGKSNKLIPRKKDWDPIKYGGFDGSKMAYAIIIEYEKQKRKVRIEKKLIQINIMEREAFEKDEKTFLEEKGYHQPKVLIKVPKYTLYECKNGRRRML | |
| | GSANEAHKGNQMLLPNHLMALLYHAEKYEAIDGESLAYIEVHRALFDELLAYISEFARKYTLSNDRLDEINMLYERNKDGDVKSIAESFVSLKKFNAFGVHQDFSFFGTKIERKRDRKL | |
| | NELLNSTIIYQSITGLYESRKRLDN | |
| 282 | MKKPYTIGLDIGTNSVGWAVLTDQYDLVKRKMKISGDSEKKQIKKNFWGVRLFEKGETAAKRRMSRTARRRIERRRNRISYLQEIFAIQMNEVDDNFFNRLKESFYAESDKKYNRHPFF | WP_031669209.1 |
| | GTVEEEVAYYKDFPTIYHLRKELIDSQKKADLRLVYLALAHIIKYRGHFLIEGALDTKNTSIDEMFKQFLQIYNQVFANDIEEASLKKTEKNQEVAQILAEKFTRKDKLDKILSLYPGE | [Listeria |
| | KTTGVFAQFVNIIVGSTGKFKKHFNLHEKKDINCAEDTYDTDLESLLAIIGDEFAEVFVAAKNAYNAVVLSNIITVTDSTTRAKLSASLIERFENHKEDLKKMKRFVRTYLPEKYDEIF | monocytogenes] |
| | DDTEKHGYAGYISGKTKQADFYKYMKATLEKIEGADYFIAKIEEENFLRKQRTFDNGVIPHQLHLEELEAILHQQAKYYPFLREDYEKIKSLVTFRIPYFVGPLAKGQSEFAWLTRKAD | |
| | GEIRPWNIEEKVDFGKSAVDFIEKMTNKDTYLPKENVLPKHSLCYQKYMVYNELTKVRYIDDQGKTNYFSGQEKQQIFNDLFKQKRKVKKKDLELFLRNINQIESPTIEGLEDSFNASY | |
| | ATYHDLLKVGMKQEILDNPLNTEMLEDIVKILTVFEDKRMIKEQLQQFSDVLDGTVLKKLERRHYTGWGRLSAKLLVGIRDKQSHLTILDYLMNDDGLNRNLMQLINDSNLSFKSIIEK | |
| | EQVSTADKDLQSIVADLAGSPAIKKGILQSLKIVDELVSVMGYPPQTIVVEMARENQTTNKGKNNSKPRYKSLEKAIKEFGSQILKEHPTDNQELKNNRLYLYYLQNGKDMYTGQELDI | |
| | HNLSNYDIDHIVPQSFITDNSVDNLVLTSSAGNREKGDNVPPLEIVQKRKIFWEKLYQGNLMSKRKFDYLTKAERGGLTEADKARFIHRQLVETRQITKNVANILHQRFNYKTDGNKDT | |
| | METVRIVTLKSALVSQFRKQFQFYKVREVNDYHHAHDAYLNGVVANTLLKVYPQLEPEFVYGEYHQFDWFKANKATAKKQFYTNIMLFFAQKDRIIDENGEILWDKRYLETVKKVLGYR | |
| | QMNIVKKTEIQKGEFSNVTPNPKGKSNKLIPRKKDWDPIKYGGFDGSKMAYAIIIEYEKQKRKVRIEKKLIQINIMEREAFEKDEKTFLEEKGYHQPKVLIKVPKYTLYECENGRRRML | |
| | GSANEAHKGNQMLLPNHLMALLYHAEKYEAIDGESLAYIEVHRALFDELLAYISEFARKYTLSNDRLDEINMLYERNKDGDVKSIAESFVSLKKFNAFGVHQDFSFFGTKIERKRDRKL | |
| | NELLNSTIIYQSITGLYESRKRLDN | |
| 283 | MKKRYSYSIGLDIGTNSVGWAVINEDYKVPAKKMTVFGNTDRKTIKKNLLGTVLFDSGETAQARRLKRTNRRRYTRRRYRLCQLQNIFATEMVKVDDTFFQRLSESFFYYQDKAFDKHP | WP_007896501.1 |
| | IFGNSKEERAYHKTYPTIYHLRKDLADRDQKADLRLIYLALSHIIKFRGHFLIEGKLNSENTDVQKLFIALVTVYNLLFEEEPIAGETCDAKALLTAKTSKSKRLESLISEFPGQKKNG | [Streptococcus |
| | LFGNLLALALGLRPNFKSNFGLSEDAKLQITKDTYEEELDNLLAEIGDHYADLFLAAKNLSDAILLSDILTLSDENTRAPLSASMIKRYEEHQEDLALLKKLVKEQMPEKYWEIFSNAK | pseudoporcinus] |
| | KNGYAGYIEGKVSQEDFYRYIKPILSRLKGGDEFLAKIDRDDFLRKQRTFDNGSIPHQIHLKELHAILRRQEKYYPFLAEQKEKIEQLLCFRIPYYVGPLAKGGNSSFAWLKRRSDEPI | |
| | TPWNFKDVVDEEASAQAFIEGMTNYDTYLPEEKVLPKHSPLYEMFTVYNELTKVKYIAENMTKPLYLSAEQKEAIIDHLFKQTRKVTVKDLKEKYFSQIEGLENVDVTGVEGAFNASLG | |
| | TYNDLLKIIKDKAFLDDEANAEILEEIVLILTLFQDEKLIEKRLAKYANLFEKSVLKKLRKRHYRGWGRLSRQLIDGMKDKASGKTILDFLKADDFANRNFIQLINDSSLDFEKLIDDA | |
| | QKKAIKRESLTEAVANLAGSPAIKKGILQSLKVVDEIVKVMGHNPDNIVIEMSRENQTTAQGLKNARQRLKKIKEVHKKTGSRILEDNSERITNLTLQDNRLYLYLLQDGKDMYTGQDL | |
| | DINNLSQYDIDHIIPQSFIKDNSIDNLVLTTQKANRGKSDNVPSIEVVRDMKDRVWRRQLANGAISRQKFDHLTKAERGGLADSDKARFLRRQLVETRQITKHVAQLLDSRFNSKSNQN | |
| | KKLARNVKIITLKSKIVSDFRKDFGLYKLREVNNYHHAHDAYLNAVVGTALLKKYPKLEAEFVYGDYKHFDLVKLISKSDPSLGKATAKVFFYSNIMNFFKEELSLADGTLMKRPVIET | |
| | NTETGEVVWDKVKDFKTIRKVLSYPQVNIVKKTEIQSGAFSKESVLSKGNSDKLIERKKGWDPKKYGGFDSPNTAYSIFVVAKVAKRKAQKLKTVKEIVGITIMEQAEYEKDNIAFLEK | |
| | KGYQDIQEKLLIKLPKYSLFELENGRRRLLASANEFQKGNELALSGKYMKFLYLASRYDKLSSKIESEQQKKLFVEQHLHYFDEILDIVVKHATCYIKAENNLKKIISLYKKKEAYSIN | |
| | EQALNMLNLFIFTSLGAPSTFVFFDETIDRKRYTTSSDVLNGILIQQSITGLYETRIDLSRFGGD | |
| 284 | MKKSYSIGLDIGTNSVGWAVVTDDYKVPAKKMKVLGNTDKSHIKKNLLGALLFDSGNTAEDRRLKRTARRRYTRRRNRILYLQEIFSEEMGKVDDSFFHRLDESFLTDDDKNFDSHPIF | WP_002277050.1 |
| | GNKAEEDAYHQKFPTIYHLRKHLADSTEKADLRLVYLALAHMIKFRGHFLIEGELNAENTDVQKLFADFVGVYDRTFDDSHLSEITVDASSILTEKISKSRRLEKLINNYPKEKKNTLF | [Streptococcus |
| | GNLIALSLGLQPNFKTNFKLSEDAKLQFSKDTYEEDLEELLGKIGDDYADLFTLAKNLYDAILLSGILTADDSSTKAPLSASMIKRYAEHHEDLEKLKEFIKANKPELYHDIFKDETKN | mutans] |
| | GYAGYIENGVKQDEFYKYLKNTLSKIAGSDYFLDKIEREDFLRKQRTFDNGSIPHQIHLQEMHAILRRQGDYYPFLKENQDRIEKILTFRIPYYVGPLARKNSRFAWAEYHSDEAVMPW | |
| | NFDQVIDKESSAQAFIEHMTNNDLYLPNEKVLPKHSPLYEKYTVYNELTKIKYVTEIGEAKFFDANLKQEIFDGLFKHERKVTKKKLRTFLDKNFDEFRIVDIQGLDKETETFNASYAT | |
| | YQDLLKVIKDKVFMDNPENAEILENIVLTLTLFEDREMIKQRLAKYADVFDKKVIDQLARRHYTGWGRLSAKLLNGIRDKQSCKTIMDYLIDDAQSNRNLMQLITDDNLTFKDDIVKAQ | |
| | YVDNSDDLHQVVQSLAGSPAIKKGILQSLKIVDELVKVMGKEPEQIVVEMARENQTTAKGRRNSQQRYKRLKEAIKSLDRDLNHKILKEHPTDNQALQNNRLFLYYLQNGRDMYTGESL | |
| | DINRLSDYDIDHVIPQAFIKDNSIDNRVLTSSKANRGKSDDVPSEDVVNRMRPFWNKLLSSGLISQRKYNNLTKKELTPDDKAGFIKRQLVETRQITKHVARMLDERFNKEFDDNNKRI | |
| | RRVKIVTLKSNLVSSFRKEFELYKVREINDYHHAHDAYLNAVVVKALLVKYPKLEPEFVYGEYPKYNSYRERKTATQKMFFYSNIMNMFKSKVKLADDQIVERPMIEVNDETGEIAWDK | |
| | TKHITTVKKVLSYPQVNIVKKVEEQTIGQNGGLFDDNPKSPLEVIPSKLVPLKKALNPEKYGGYQKPTTAYPILLIVDTKQLIPISVMDKKRFEQNPVKFLKDKGYQQIEKNNFVKLPK | |
| | YTLVDIGNGIKRLWASSKEVHKGNQLVVSKKSQDLLYHAHHLDNDYSNEYVKNHYQQFDILFNEITSFSKKCKLGKEHIQKIEEAYSKERDSASIEELADGFIKLLGFTQLGATSPFSF | |
| | LGIKLNQKQYTGKKDYLLPCMEATLIHQSITGLYETRIDLNKLGGD | |
| 285 | MKNDYTIGLDIGTNSVGYSVVTDDYKVISKKMNVFGNTEKKSIKKNFWGVRLFESGQTAQEARMKRTSRRRIARRKNRICYLQEIFQPEMNHLDNNFFYRLNESFLVADDAKYDKHPIF | WP_007209003.1 |
| | GTLDEEIHFHEQFPTIYHLRKYLADGDEKADLRLVYLAIAHIIKFRGNFLIEGELNTENNSVIELSKVFVQLYNQTLSELEGFQFIDESIDFSEVLTQQLSKSERADNVLKLFPDEKGT | [Enterococcus |
| | GIFAQFIKLIVGNQGNFKKVFQLEEDQKLQLSTDDYEENIENLLAIIGDEYGDIFVAAQNLYQAILLAGILTSTEKTRAKLSAS+IQRYEEHAKDLKLLKRFVKEHIPDKYAEIFNDAT | italicus] |
| | KNGYAGYIDGKTKEEEFYKYLKTTLVQKSGYQYFIEKIEQENFLRKQRIYDNGVIPHQVHAEELRAILRKQEKYYSFLKENHEKIEQIFKVRIPYYVGPLAKHNEQSRFAWNIRKSDEP | |
| | IRPWNMNDVVDENASAVAFIERMTIKDIYLNENVLPRHSLIYEKFTVFNELTKVLYADDRGVFQRFSAEEKEDIFEKLFKSERKVTKKKLENYLRIELSISSPSVKGIEEQFNANFGTY | |
| | LDLKKFDELHPYLDDEKYQDTLEEVIKVLTVFEDRSMIQNQLEQLPLNLSTKTIKALSRRKYTGWGRLSARLIDGIHDKNSGKTILDYLIEDESDSYIVNRNFMQLINDDHLSFKKIIE | |
| | DSQPYKEQQSAEEIVSELSGSPAIKKGILQSLKIVDELVAIMGYKPKNIVVEMARENQTTGRGKQNSKPRLKGIENGLKEFSDSVLKGSSIDNKQLQNDRLYLYYLQNGKDMYTGHELD | |
| | IDHLSTYDIDHIIPQSFLTDNSIDNRVLTTSKSNRGKSDNVPSEEVVRKMDRFWRKLLNAKLISERKYTNLTKKELTESDKAGFLKRQLVETRQITKHVATILDSKFNEDSNNRDVQII | |
| | TLKSALVSEFRKTFNLYKVREINDLHHAHDAYLNAVVALSLLRVYPQLKPEFVYGEYGKNSIHDQNKATIKKQFYSNITRYFASKDYIINDDGEILWNKQETIAQVIKTLGMHQVNVVK | |
| | KVEIQKGGFSKESIQPKGESQKLIRRKQQWNTKKYGGFDSPVVAYAILLSFDKGKRKARSFKIVGITIQDRESFEGNPILYLSKKDYHNPKVEAILPKYSLFEFENGRRRMVASASETQ | |
| | KGNQLIIPGHLMELLYHSKKIINGKNSDSVSYIQNNKEKFREIFEYIVDFSSKYISADANLNKIEKIFENNFHKASEQEIAKSFINLLTFTAMGAPADFEFFGEKIPRKRYVSISEIID | |
| | AVFIHQSITGLYETRVRLTEV | |
| 286 | MKNPYTIGLDIGTNSVGWAVLTDQYDLVKRKMKVAGNSDKKQIKKNFWGVRLFDDGQTAVDRRMNRTARRRIERRRNRISYLQEIFAVEMANIDANFFCRLNDSFYVDSEKRNSRHPFF | WP_003727705.1 |
| | ATIEEEVAYHKNYRTIYHLREELVNSSEKADLRLVYLALAHIIKYRGNFLIEGALDTKNTSVDEVYKQFIQTYNQVFMSNIEEGALAKVEENTEVASILAGKFTRREKFERILRLYPGE | [Listeria |
| | KSTGMFAQFISLIVGNKGNFQKVFNLVEKTDIECAKDSYEEDLEALLAIIGDEYAELFVAAKNTYNAVVLSSIITVTATETNAKLSAS+IERFDAHEKELGELKAFIKLHLPKQYQEIF | monocytogenes] |
| | NNAEIDGYAGYIDGKTKQVDFYKYLKTTLENVEGADYFITKIEEENFLRKQRTFDNGVIPHQLHLEELEAILHQQAKYYPFLREGYDKIKSLVTFRIPYFVGPLANGQSEFAWLTRKDD | |
| | GEIRPWNIEEKVDFGKSAVDFIEKMTNKDTYLPKENVLPKHSLCYQKYMVYNELTKIRYIDDQGKTNYFSGREKQQIFNDLFKQKRKVKKKDLELFLRNINHIESPTIEGLEDSFNASY | |
| | ATYHDLLKVGLKQEILDNPLNTEILEDIVKILTVFEDKRMIKEQLEQFSDVLDGVVLKKLERRHYTGWGRLSAKLLVGIRDKQSHLTILDYLMNDDGLNRNLMQLINDSNLSFKSIIEK | |
| | EQVSTTDKDLQSIVADLAGSPAIKKGILQSLKIVDELVSIMGYPPQTIVVEMARENQTTGKGKNNSKPRYKSLEKAIKDFGSQILKEHPTDNQELKNNRLYLYYLQNGKDIYTGQELDI | |
| | HNLSNYDIDHIVPQSFITDNSIDNLVLTSSAGNREKGGDVPPLEIVRKRKVFWEKLYQGNLMSKRKFDYLTKAERGGLTEADKARFIHRQLVETRQITKNVANILHQRFNKETDNHGNT | |
| | MEQVRIVTLKSALVSQFRKQFQLYKVREVNDYHHAHDAYLNGVVANTLLKVYPQLEPEFVYGEYHQFDWFKANKATAKKQFYTNIMLFFAQKERIIDENGEILWDKKYLETIKKVLDYR | |
| | QINIVKKTEIQKGEFSKATIKPKGNSSKLIPRKENWDPMKYGGLDSPNMAYAVIIEHAKGKKKIVIEKKLIQINIMERKMFEKDEEAFLEEKGYHQPKVLTKLPKYTLYECEKGRRRML | |
| | SSANEAQKGNQLVLSNHLVSLLYHAKNCEASDGKSLKYIEAHRETFSELLAQVSEFATKYTLADANLSKINNLFEQNKEGDIKAIAQSFVDLMAFNAMGAPASFKFFEATIDRKRYTNL | |
| | KELLSSTIIYQSITGLYESRKRLDD | |
| 287 | MKNPYTIGLDIGTNSVGWAVLTDQYDLVKRKMKVAGNSDKKQIKKNFWGVRLFDDGQTAVDRRMNRTARRRIERRRNRISYLQEIFAVEMANIDANFFCRLNDSFYVDSEKRNSRHPFF | WP_003730785.1 |
| | ATIEEEVAYHKNYRTIYHLREELVNSSEKADLRLVYLALAHIIKYRGNFLIEGALDTKNTSVDEVYKQFIQTYNQVFMSNIEEGALAKVEENTEVASILAGKFTRREKFERILRLYPGE | [Listeria |
| | KSTGMFAQFISLIVGNKGNFQKVFNLVEKTDIECAKDSYEEDLEALLAIIGDEYAELFVAAKNTYNAVVLSSIITVTATETNAKLSAS+IERFDAHEKELGELKAFIKLHLPKQYQEIF | monocytogenes] |
| | NNAEIDGYAGYIDGKTKQVDFYKYLKTTLENVEGADYFITKIEEENFLRKQRTFDNGVIPHQLHLEELEAILHQQAKYYPFLREGYDKIKSLVTFRIPYFVGPLANGQSEFAWLTRKDD | |
| | GEIRPWNIEEKVDFGKSAVDFIEKMTNKDTYLPKENVLPKHSLCYQKYMVYNELTKIRYIDDQGKTNYFSGREKQQIFNDLFKQKRKVKKKDLELFLRNINHIESPTIEGLEDSFNASY | |
| | ATYHDLLKVGLKQEILDNPLNTEILEDIVKILTVFEDKRMIKEQLEQFSDVLDGVVLKKLERRHYTGWGRLSAKLLVGIRDKQSHLTILDYLMNDDGLNRNLMQLINDSNLSFKSIIEK | |
| | EQVSTTDKDLQSIVADLAGSPAIKKGILQSLKIVDELVSIMGYPPQTIVVEMARENQTTGKGKNNSKPRYKSLEKAIKDFGSQILKEHPTDNQELKNNRLYLYYLQNGKDIYTGQELDI | |
| | HNLSNYDIDHIVPQSFITDNSIDNLVLTSSAGNREKGGDVPPLEIVRKRKVFWEKLYQGNLMSKRKFDYLTKAERGGLTEADKARFIHRQLVETRQITKNVANILHQRFNKETDNHGNT | |
| | MEQVRIVTLKSALVSQFRKQFQLYKVREVNDYHHAHDAYLNGVVANTLLKVYPQLEPEFVYGEYHQFDWFKANKATAKKQFYTNIMLFFAQKERIIDENGEILWDKKYLETIKKVLDYR | |
| | QINIVKKTEIQKGEFSKATIKPKGNSSKLIPRKENWDPVKYGGLDSPNMAYAVIIEHAKGKKKIVIEKKLIQINIMERKMFEKDEEAFLEEKGYHQPKVLTKLPKYTLYECEKGRRRML | |
| | SSANEAQKGNQLVLSNHLVSLLYHAKNCEASDGKSLKYIEAHRETFSELLAQVSEFATKYTLADANLSKINNLFEQNKEGDIKAIAQSFVDLMAFNAMGAPASFKFFEATIDRKRYTNL | |
| | KELLSSTIIYQSITGLYESRKRLDD | |
| 288 | MKNPYTIGLDIGTNSVGWAVLTDQYDLVKRKMKVAGNSDKKQIKKNFWGVRLFDDGQTAVDRRMNRTARRRIERRRNRISYLQEIFAVEMANIDANFFCRLNDSFYVDSEKRNSRHPFF | WP_031665337.1 |
| | ATIEEEVAYHKNYRTIYHLREELVNSSEKADLRLVYLALAHIIKYRGNFLIEGALDTKNTSVDGVYEQFIQTYNQVFMSNIEEGTLAKVEENIEVANILAGKFTRREKFERILQLYPGE | [Listeria |
| | KSTGMFAQFISLIVGSKGNFQKVFDLIEKTDIECAKDSYEEDLETLLAIIGDEYAELFVAAKNTYNAVVLSSIITVNDTETNAKLSAS+IERFDAHEKDLVELKAFIKLNLPKQYEEIF | monocytogenes] |
| | SNAAIDGYAGYIDGKTKQVDFYKYLKTILENIEGSDYFIAKIEEENFLRKQRTFDNGAIPHQLHLEELEAIIHQQAKYYTFLKEDYDKIKSLVTFRIPYFVGPLANGQSEFAWLTRKAD | |
| | GEIRPWNIEEKVDFGKSAVDFIEKMTNKDTYLPKENVLPKHSLCYQKYMVYNELTKVRYIDDQGKTNYFSGQEKQQIFNDLFKQKRKVKKKDLELFLRNINQIESPTIEGLEDSFNASY | |
| | ATYHDLLKVGMKQEILDNPLNTEMLEDIVKILTVFEDKRMIKEQLQQFSDVLDGVVLKKLERRHYTGWGRLSAKLLVGIRDKQSHLTILEYLMNDDGLNRNLMQLINDSNLSFKSIIEK | |
| | EQVSTTDKDLQSIVAELAGSPAIKKGILQSLKIVDELVSIMGYPPQTIVVEMARENQTTGKGKNNSKPRYKSLEKAIKEFGSQILKEHPTDNQELKNNRLYLYYLQNGKDMYTGQELDI | |
| | HNLSNYDIDHIVPQSFITDNSIDNLVLTSSAGNREKGGDVPPLEIVRKRKVFWEKLYQGNLMSKRKFDYLTKAERGGLTEADKARFIHRQLVETRQITKNVANILHQRFNKETDNHGNT | |
| | MEQVRIVTLKSALVSQFRKQFQLYKVREVNDYHHAHDAYLNGVVANTLLKVYPQLEPEFVYGEYHQFDWFKANKATAKKQFYTNIMLFFAQKERIIDENGEILWDKKYLETIKKVLDYR | |
| | QMNIVKKTEIQKGEFSKATIKPKGNSSKLIPRKENWDPMKYGGLDSPNMAYAVIIEHAKGKKRIVIEKKLIQINIMERKMFEKDEEAFLEEKGYRHPKVLTKLPKYTLYECEKGRRRML | |
| | ASANEAQKGNQLVLSNHLVSLLYHAKNCEASDGKSLKYIEAHRETFSELLAQVSEFATRYTLADANLSKINNLFEQNKEGDIKAIAQSFVDLMAFNAMGAPASFKFFEATIDRKRYTNL | |
| | KELLSSTIIYQSITGLYESRKRLDD | |
| 289 | MKNPYTIGLDIGTNSVGWAVLTDQYDLVKRKMKVAGNSDKKQIKKNFWGVRLFDEGETAADRRMNRTARRRIERRRNRISYLQEIFALEMANIDANFFCRLNDSFYVDSEKRNSRHPFF | WP_003739838.1 |
| | ATIEEEVAYHKNYRTIYHLREELVNSSEKADLRLVYLALAHIIKYRGNFLIEGALDTKNTSVDGVYKQFIQTYNQVFISNIEEGTLAKMEENTTVADILAGKFTRKEKLERILQLYPGE | [Listeria |
| | KSTGMFAQFISLIVGSKGNFQKVFDLVEKTDIECAKDSYEEDLEALLAIIGDEYAELFVAAKNTYNAVVLSSIITVTDTETNAKLSAS+IERFDAHEKDLSELKAFIKLHLPKQYEEIF | monocytogenes] |
| | SNVAIDGYAGYIDGKTKQVDFYKYLKTLLENIEGADYFIAKIEEENFLRKQRTFDNGAIPHQLHLEELEAILHQQAKYYPFLKEAYDKIKSLVTFRIPYFVGPLANGQSDFAWLTRKAD | |
| | GEIRPWNIEEKVDFGKSAVDFIEKMTNKDTYLPKENVLPKHSLYYQKYMVYNELTKVRYIDDQGKTNYFSGQEKQQIFNDYFKQKRKVSKKDLEQFLRNMSHIESPTIEGLEDSFNSSY | |
| | ATYHDLLKVGIKQEVLENPLNTEMLEDIVKILTVFEDKRMIKEQLQQFSDVLDGAVLKKLERRHYTGWGRLSAKLLVGIRDKQSHLTILDYLMNDDGLNRNLMQLINDSNLSFKSIIEK | |
| | EQVSTTDKDLQSIVADLAGSPAIKKGILQSLKIVDELVSIMGYPPQTIVVEMARENQTTVKGKNNSRPRYKSLEKAIKEFGSQILKEHPTDNQELRNNRLYLYYLQNGKDMYTGQELDI | |
| | HNLSNYDIDHIVPQSFITDNSIDNLVLTSSAGNREKGDDVPPLEIVRKRKVFWEKLFQGNLMSKRKFDYLTKAERGGLTEADKATFIHRQLVETRQITKNVANILHQRFNNETDNHGNN | |
| | MEQVRIVMLKSALVSQFRKQFQLYKVREVNDYHHAHDAYLNGVVANTLLKVYPQLEPEFVYGEYHQFDWFKANKATAKKQFYTNIMLFFAQKERIIDENGEILWDKKYLETIKKVLDYR | |
| | QMNIVKKTEIQKGEFSKATIKPKGNSSKLIPRKENWDPMKYGGLDSPNMAYAVIIEHAKGKKKVVFEKKIIRITIMERKAFEKDEKSFLEKQGYRQPKVLTKLPKYTLYECENGRRRML | |
| | ASANEAQKGNQQVLKGQLITLLHHAKNCEASDGKSLDYIESNREMFGELLAHVSEFAKRYTLADANLSKINQLFEQNKDNDIKVIAQSFVNLMAFNAMGAPASFKFFEATIERKRYTNL | |
| | KELLSATIIYQSITGLYEARKRLDG | |
| 290 | MKNPYTIGLDIGTNSVGWAVLTNQYDLVKRKMKVAGNSDKKQIKKNFWGVRLFDDGQTAVDRRMNRTARRRIERRRNRISYLQEIFAVEMANIDANFFCRLNDSFYVDSEKRNSRHPFF | WP_003723650.1 |
| | ATIEEEVAYHDNYRTIYHLREKLVNSSEKADLRLVYLALAHIIKYRGNFLIEGALDTKNTSVDEVYKQFIETYNQVFMSNIEEGALAKVEENIEVANILAGKFTRREKFERILQLYPGE | [Listeria |
| | KSTGMFAQFISLIVGSKGNFQKVFDLIEKTDIECAKDSYEEDLETLLAIIGDEYAELFVAAKNTYNAVVLSSIITVTDTETNAKLSAS+IERFDAHEKDLVELKAFIKLNLPKQYEEIF | monocytogenes] |
| | SNAAIDGYAGYIDGKTKQVDFYKYLKTILENIEGSDYFIAKIEEENFLRKQRTFDNGAIPHQLHLEELEAIIHQQAKYYPFLKEDYDKIKSLVTFRIPYFVGPLANGQSEFAWLTRKAD | |
| | GEIRPWNIEEKVDFGKSAVDFIEKMTNKDTYLPKENVLPKHSLCYQKYMVYNELTKIRYIDDQGKTNYFSGREKQQVFNDLFKQKRKVKKKDLELFLRNINHIESPTIEGLEDSFNASY | |
| | ATYHDLLKVGMKQEILDNPLNTEMLEDIVKILTVFEDKPMIKEQLQQFSDVLDGGVLKKLERRHYTGWGRLSAKLLVGIREKQSHLTILDYLMNDDGLNRNLMQLINDSNLSFKSIIEK | |
| | EQVSTTDKDLQSIVAELAGSPAIKKGILQSLKIVDELVSIMGYPPQTIVVEMARENQTTGKGKNNSKPRYKSLEKAIKEFGSQILKEHPTDNQELKNNRLYLYYLQNGKDMYTGQELDI | |
| | HNLSNYDIDHIVPQSFITDNSIDNLVLTSSAGNREKGGDVPPLEIVRKRKVFWEKLYQGNLMSKRKFDYLTKAERGGLTEADKARFIHRQLVETRQITKNVANILYQRFNKETDNHGNT | |
| | MEQVRIVTLKSALVSQFRKQFQLYKVREVNGYHHAHDAYLNGVVANTLLKVYPQLEPEFVYGEYHQFDWFKANKATAKKQFYTNIMLFFAQKERIIDENGEILWDKKYLETIKKVLDYR | |
| | QMNIVKKTEIQKGEFSKATIKPKGNSSKLIPRKENWDPMKYGGLDSPNMAYAVIIEHAKGKKKIVIEKKLIQINIMERKMFEKDEEAFLEEKGYRHPKVLTKLPKYTLYECEKGRRRML | |
| | ASANEAQKGNQLVLSNHLVSLLYHAKNCEASDGKSLKYIEAHRETFSELLAQVSEFATRYTLADANLSKINNLFEQNKEGDIKAIAQSFVDLMAFNAMGAPASFKFFEATIDRKRYTNL | |
| | KELLSSTIIYQSITGLYESRKRLDD | |
| 291 | MKNPYTIGLDIGTNSVGWAVLTNQYDLVKRKMKVAGNSDKKQIKKNFWGVRLFDDGQTAVDRRMNRTARRRIERRRNRISYLQEIFAVEMANIDANFFCRLNDSFYVDSEKRNSRHPFF | WP_023548323.1 |
| | ATIEEEVAYHKNYRTIYHLREELVNSSEKADLRLVYLALAHIIKYRGNFLIEGALDTKNTSVDGVYEQFILTYNQVFMSNIEEGTLAKVEENIEVANILAGKFTRREKFERILQLYPGE | [Listeria |
| | KSTGMFAQFISLIVGSKGNFQKVFDLIEKTDIECAKDSYEEDLETLLAIIGDEYAELFVAAKNTYNAVVLSSIITVTDTETNAKLSAS+IERFDAHEKDLVELKAFIKLNLPKQYEEIF | monocytogenes] |
| | SNAAIDGYAGYIDGKTKQVDFYKYLKTTLENVEGADYFITKIEEENFLRKQRTFDNGVIPHQLHLEELEAILHQQAKYYPFLREDYEKIKSLVTFRIPYFVGPLAKGQSEFAWLTRKAD | |
| | GEIRPWNIEEKVDFGKSAVDFIEKMTNKDTYLPKENVLPKHSLCYQKYMVYNELTKIRYIDDQGKTNYFSGQEKQQIFNDLFKQKRKVKKKDLELFLRNINHVESPTIEGLEDSFNASY | |
| | ATYHDLMKVGIKQEILDNPLNTEMLEDIVKILTVFEDKRMIKEQLQQFSDVLDGTVLKKLERRHYTGWGRLSAKLLVGIRDKQSHLTILDYLMNDDGLNRNLMQLINDSNLSFKSIIEK | |
| | EQVSTADKDLQSIVADLAGSPAIKKGILQSLKVVEELVSVMGYPPQTIVVEMARENQTTNKGKNNSKPRYKSLEKAIKEFGSQILKEHPTDNQELKNNRLYLYYLQNGKDMYTGQELDI | |
| | HNLSNYDIDHIVPQSFITDNSIDNLVLTSSAGNREKGDNVPPLEIVQKRKIFWEKLYQGNLMSKRKFDYLTKAERGGLTEADKARFIHRQLVETRQITKNVANILHQRFNYKTDDNEDT | |
| | MEPVRIVTLKSALVSQFRKQFQLYKVREVNDYHHAHDAYLNGVVANTLLKVYPQLEPEFVYGEYHQFDWFKANKATAKKQFYTNIMLFFAQKERIIDENGEILWDKKYLETIKKVLNYR | |
| | QMNIVKKTEIQKGEFSNQNPKPRGDSSKLIPKKTNLNPIKYGGFEGSNMAYAIIIEHEKRKKKVTIEKKLIQINIMERKAFEKDEKVFLEGKGYHQPKVLTKLPKYALYECENGRRRML | |
| | GSANEVHKGNQMLLPNHLMTLLYHAEKREAIDGESLAYIEAHKAVFGELLAHISEFARKYTLANDKLDEINMLYERNKDGDVKSIAESFVSLKKFNAFGVHKDFNFFGTTIKRKRDRKL | |
| | KELLNSTIIYQSITGLYESRKRLDS | |
| 292 | MKNPYTIGLDIGTNSVGWAVLTNQYDLVKRKMKVAGNSDKKQIKKNFWGVRLFDDGQTAVDRRMNRTARRRIERRRNRISYLQEIFAVEMANIDANFFCRLNDSFYVDSEKRNSRHPFF | WP_014601172.1 |
| | ATIEEEVAYHKNYRTIYHLREELVNSSEKADLRLVYLALAHIIKYRGNFLIEGALDTKNTSVDGVYEQFIQTYNQVFMSNIEEGTLAKVEENIEVANILAGKFTRREKFERILQLYPGE | [Listeria |
| | KSTGMFAQFISLIVGSKGNFQKVFDLIEKTDIECAKDSYEEDLEALLAIIGDEYAELFVAAKNTYNAVVLSSIITVTATETNAKLSAS+IERFDAHEKDLGELKAFIKLHLPKQYQEIF | monocytogenes] |
| | NNAAIDGYAGYIDGKTKQVDFYKYLKTILENIEGADYFIAKIEEENFLRKQRTFDNGAIPHQLHLEELEAIIHQQAKYYPFLREDYEKIKSLVTFRIPYFVGPLAKGQSEFAWLTRKAD | |
| | GEIRPWNIEEKVDFGKSAVDFIEKMTNKDTYLPKENVLPKHSLCYQKYMVYNELTKVRYIDDQGKTNYFSGQEKQQIFNDLFKQKRKVKKKDLELFLRNINHIESPTIEGLEDSFNASY | |
| | ATYHDLLKVGMKQEILDNPLNTEMLEDIVKILTVFEDKPMIKEQLQQFSDVLDGGVLKKLERRHYTGWGRLSAKLLVGIREKQSHLTILDYLMNDDGLNRNLMQLINDSNLSFKSIIEK | |
| | EQVSTTDKDLQSIVADLAGSPAIKKGILQSLKIVDELVSIMGYPPQTIVVEMARENQTTGKGKNNSKPRYKSLEKAIKEFGSKILKEHPTDNQELKNNRLYLYYLQNGKDMYTGQELDI | |
| | HNLSNYDIDHIVPQSFITDNSIDNLVLTSSAGNREKGGDVPPLEIVRKRKVFWEKLYQGNLMSKRKFDYLTKAERGGLTDADKARFIHRQLVETRQITKNVANILHQRFNNETDNHGNT | |
| | MEQVRIVTLKSALVSQFRKQFQLYKVREVNDYHHAHDAYLNGVVANTLLKVYPQLEPEFVYGEYHQFDWFKANKATAKKQFYTNIMLFFGQKERIIDENGEILWDKKYLETIKKVLDYR | |
| | QMNIVKKTEIQKGEFSKATIKPKGNSSKLIPRKENWDPMKYGGLDSPNMAYAVIIEHAKGKKKLIFEKKIIRITIMERKMFEKDEEAFLEEKGYRHPKVLTKLPKYTLYECEKGRRRML | |
| | ASANEAQKGNQLVLSNHLVSLLYHAKNCEASDGKSLKYIEAHRETFSELLAQVSEFATRYTLADANLSKINNLFEQNKEGDIQAIAQSFVDLMAFNAMGAPASFKFFEATIDRKRYTNL | |
| | KELLSSTIIYQSITGLYESRKRLDD | |
| 293 | MKNPYTIGLDIGTNSVGWAVLTNQYDLVKRKMKVAGNSDKKQIKKNFWGVRLFDDGQTAVDRRMNRTARRRIERRRNRISYLQEIFAVEMANIDANFFCRLNDSFYVDSEKRNSRHPFF | WP_033920898.1 |
| | ATIEEEVAYHKNYRTIYHLREELVNSSEKADLRLVYLALAHIIKYRGNFLIEGALDTKNTSVDGVYEQFIQTYNQVFMSNIEEGTLAKVEENIEVANILARKFTRREKFERILQLYPGE | [Listeria |
| | KSTGMFAQFISLIVGSKGNFQKVFDLIEKTDIECAKDSYEEDLETLLAIIGDEYAELFVAAKNTYNAVVLSSIITVTDTETNAKLSAS+IERFDAHEKDLVELKAFIKLNLPKQYEEIF | monocytogenes] |
| | SNAAIDGYAGYIDGKTKQVDFYKYLKTILENIEGADYFIAKIEEENFLRKQRTFDNGAIPHQLHLEELEAIIHQQAKYYPFLREDYEKIKSLVTFRIPYFVGPLAKGQSEFAWLTRKAD | |
| | GEIRPWNIEEKVDFGKSAVDFIEKMTNKDTYLPKENVLPKHSLCYQKYMVYNELTKIRYIDDQGKTNYFSGQEKQQIFNDLFKQKRKVKKKDLELFLRNINHVESPTIEGLEDSFNASY | |
| | ATYHDLMKVGIKQEILDNPLNTEMLEDIVKILTVFEDKRMIKEQLQQFSDVLDGTVLKKLERRHYTGWGRLSAKLLVGIRDKQSHLTILDYLMNDDGLNRNLMQLINDSNLSFKSIIEK | |
| | EQVSTADKDLQSIVADLAGSPAIKKGILQSLKVVEELVSVMGYPPQTIVVEMARENQTTNKGKNNSKPRYKSLEKAIKEFGSQILKEHPTDNQELKNNRLYLYYLQNGKDMYTGQELDI | |
| | HNLSNYDIDHIVPQSFITDNSIDNLVLTSSAGNREKGDNVPPLEIVQKRKIFWEKLYQGNLMSKRKFDYLTKAERGGLTEADKARFIHRQLVETRQITKNVANILHQRFNYKTDDNEDT | |
| | MEPVRIVTLKSALVSQFRKQFQLYKVREVNDYHHAHDAYLNGVVANTLLKVYPQLEPEFVYGEYHQFDWFKANKATAKKQFYTNIMLFFAQKERIIDENGEILWDKKYLETIKKVLNYR | |
| | QMNIVKKTEIQKGEFSNQNPKPRGDSSKLIPKKTNLNPIKYGGFEGSNMAYAIIIEHEKRKKKVTIEKKLIQINIMERKAFEKDEKVFLEGKGYHQPKVLTKLPKYALYECENGRRRML | |
| | GSANEVHKGNQMLLPNHLMTLLYHAEKREAIDGESLAYIEAHKAVFGELLAHISEFARKYTLANDKLDEINMLYERNKDGDVKSIAESFVSLKKFNAFGVHKDFNFFGTTIKRKRDRKL | |
| | KELLNSTIIYQSITGLYESRKRLDS | |
| 294 | MKNYTIGLDIGTNSVGWAVIKDDLTLVRKKIKISGNTDKKEVKKNLWGSFLFEQGDTAQDTRVKRIARRRYERRRFRIRELQKIFDKSMGEVDSNFFHRLDESFLVEEDKEYSKYPIFS | WP_034440723.1 |
| | NEKEDKNYYDKYPTIYHLRKDLADSNQKADLRLIYLALAHMIKYRGHFLIEGDLKMDGISISESFQEFIDSYNEVCALEDENLEITYNDELLTQIENIFKQDISRSKKLDQAIALFQGV | [Clostridiales |
| | KRQSLFGIFLTLIVGNKANFQKIFNLEDDIKLDLKEEDYDENLEELLSNIDEGYRDVFLQAKNVYNAIELSKILKTDGKETKAPLSAQMVELYNQHREDLKKYKDYIKAYLPEKYGETF | bacterium S3 A11 |
| | KDATKNGYAGYIDGKTSQEDFYKFVKAQLKGEENGEYFLEAIENENFLRKQRSFYNGVIPYQIHLQELTAVLDQQEKHYSFLKENRDKIISLLTFRIPYYVGPLAKGESRFAWLERSNS | |
| | EEKIKPWNFDKIVDIDKSAELFIENLTSRDTYLPDEPVLPKRSLIYQKFTIFNELTKISYIDERGILQNFSSREKIAIFNDLFKNKSKVTKNQLVKYIENKEQIIAPEIKGIEDSFNSN | |
| | YSTYIDLSKIPDMKKLLEKDEDEILEEIIKILTIFEDRKMRKRQLMKFKDKLSEKAINQLSKKHYTGWGQLSEKLINGIRDEQSNKTILDYLIEDNGCPKNMNRNFMQLINDDTLSFKE | |
| | KIRKAQDINQVNDIKEIVKDLPGSPAIKKGIYQSIRIVDEIIRKMKDRPKNIVIEMARENQTTQEGKNKSKARLKKIQEGLENLDSVHVEKQALDEEMLKSPKYYLYCLQNGKDIYTGK | |
| | DLDIGQLQTYDIDHIIPRSFITDNSFDNLVLTSSTVNRGKLDNVPSPDIVRQQKGFWKQLLRAGLMSQRKFNNLTKGKLTDRDRQQFINRQLVETRQITKHVANLLSHHLNEKKEVGEI | |
| | NIVLLKSALTSQFRKKFDFYKVREVNDYHHAHDAYLNGVIALKLLELYPYMAKDLIYGKYSYHRKIEGDKATQAKYKMSNIIERFSQDLLANPDGEIAWEKDKDLNTIRKVLSSKQINI | |
| | IKKAEEGKGRLFKETINSRPSKKTEKRIPIKNNLDPNIYGGYIEEKMAYYIAINYLENGKTKKAIVGISIKDKKDFEGQTTEYLGKIGFNKASIINSFKNYTLFELENGSRRMIVGASK | |
| | ENDSKGELQKGNQMYLPQNLLEFVYHLKHYNEDETSHKFIVEHKAYFDELLNYIVEFANKYLELENSIEKIKDLYHGKGPDVEEKELVESFINLLAITKCGPAADITFLGEKISRKRYR | |
| | STNCLWGSEVIFQSPTGLYETRLRLE | |
| 295 | MKVLGNTDRQTVKKNMIGTLLFDSGETAEARRLKRTARRRYTRRINRIKYLQSIFDDEMSKIDSAFFQRIKDSFLVPDDKNDDRHPIFGNIKDEVDYHKNYPTIYHLRKKLADSDEKAD | WP_003107102.1 |
| | LRLIYLALAHIIKFRGHFLIEGDLDSQNTDVNALFLKLVDTYNLMFEDDKIDTQTIDATVILTEKMSKSRRLENLIAKIPNQKKNTLFGNLISLSLGLTPNFKANFELSEDAKLQISKE | [Streptococcus |
| | SFEEDLDNLLAQIGDQYADLFIAAKNLSDAILLSDILTVKGVNTKAPLSASMVQRFNEHQDDLKLLKKLVKVQLPEKYKEIFDIKDKNGYAGYINGKTSQEDFYKYIKPILSKLKGAES | parauberis] |
| | LISKLEREDFLRKQRTFDNGSIPHQIHLNELKSIIRRQEKYYPFLKDKQVRIEKIFTFRIPYFVGPLANGNSSFAWVKRRSNESITPWNFEEVVEQEASAKVFIERMTNFDTYLPEEKV | |
| | LPKHSLLYEMFTVYNELTKVKYQAEGMRKPEFLSSEEKIEIVSNLFKTERKVTVKQLKENYFNKIRCLDSITISGVEDKFNASLGTYHDLLNIIKNQKILDDEQNQDSLEDIVLTLTLF | |
| | EDEKMIAKRLSKYESIFDPSILKKLKKRHYTGWGRLSQKLINGIRDKQTGKTILDFLIEDGQANRNFMQLINDPSLDFASIIKEAQEKTIKSEKLEETIANLAGSPAIKKGILQSVKIV | |
| | DEVVKVMGYEPSNIVIEMARENQSTQRGINNSRERLRKLEEVHKNIGSKILKEHEISNAQLQSDRVYLYLLQDGKDMYTGKDLDFDRLSQYDIDHIIPQSFIKDNSIDNIVLTSQESNR | |
| | GKSDNVPYIAIVNKMKSYWQHQLKSGAISQRKFDNLTKAERGGLSEYDKAGFIKRQLVETRQITKHVAQILNNRFNNNVDDSSKNKRPVKIITLKSKMVSDFRKEFGFYKIREVNDYHH | |
| | AHDAYLNAVVGTALLKKYPKLEAEFVYGDYKHYDLASLVVKSDTSLGKATAKMFFYSNIMNFFKKEVRLADGTVITRPQIETNTETGEIVWDKVKDIKTIRKVLSIPQINVVKKTEVQT | |
| | GGFSKESILSKRDSDKLIPRKNNWDPKKYGGFGSPIIAYSVLVVAKVTKGKSQKTKSVKELVGITIMEQNEFEKDRITFLEKKGYQDIQESLIIKLPKFSLFELENGRKRLLASAKELQ | |
| | KGNELSLPNKYIQFLYLASRYTSFSGKEEDREKHRHFVESHLHYFDEIKDIIADFSRRYILADANLEKILTLYNEKNQFSIEEQATNMLNLFTFTGLGAPATLKFFNVDIDRKRYTSST | |
| | EILNSTLIRQSITGLYETRIDLSKIGGD | |
| 296 | MMKKEYSIGLDIGTNSVGWAVITDDYKVPAKKMKVLGNTDKQSIKKNLLGALLFDSGETAEATRLKRTARRRYTRRKNRLRYLQEIFTEEMNKVDENFFQRLDDSFLVEEDKQGSKYPI | WP_037593752.1 |
| | FGTLKEEKEYHKKFKTIYHLREELANSKEKADLRLVYLALAHMIKFRGHFLYEGDLKAENTDVQALFKDFVEEYDKTIEESHLSEITVDALSILTEKVSKSSRLENLIAHYPTEKKNTL | [Streptococcus |
| | FGNLIALSLGLQPNFKTNFQLSEDAKLQFSKDTYEEDLEELLGEIGDEYADLFASAKNLYDAILLSGILAVDDNTTKAPLSASMVKRYEEHQKDLKKLKDFIKVNAPDQYNAIFKDKNK | anginosus] |
| | KGYAGYIESGVEQDEFYKYLKGILLKINGSGDFLDKIDCEDFLRKQRTFDNGSIPHQIHLQEMHAILRRQGEHYPFLKENQDKIEKILTFRIPYYVGPLARKGSRFAWAEYKADEKITP | |
| | WNFDDILDKEKSAEKFITRMTLNDLYLPEEKVLPKHSPLYETFTVYNELTKVKYVNEQGEAKFFDTNMKQEIFDHVFKENRKVTKDKLLNYLNKEFEEFRIVNLTGLDKENKAFNSSLG | |
| | TYHDLRKILDKSFLDDKANEKTIEDIIQTLTLFEDREMIRQRLQKYSDIFTKAQLKKLERRHYTGWGRLSYKLINGIRNKENKKTILDYLIDDGYANRNFMQLINDDALSFKEEIARAQ | |
| | IIGDVDDIANVVHDLPGSPAIKKGILQSVKIVDELVKVMGHNPANIIIEMARENQTTDKGRRNSQQRLKLLQDSLKNLDNPVNIKNVENQQLQNDRLFLYYIQNGKDMYTGETLDINNL | |
| | SQYDIDHIIPQAFIKDNSLDNRVLTRSDKNRGKSDDVPSIEVVHEMKSFWSKLLSVKLITQRKFDNLTKAERGGLTEEDKAGFIKRQLVETRQITKHVAQILDERFNTEFDGAQRRIRN | |
| | VKIITLKSNLVSNFRKEFELYKVREINDYHHAHDAYLNAVVGNALLLKYPQLEPEFVYGEYPKYNSYRSRKSATEKFLFYSNILRFFKKEDIQTNEDGEIAWNKEKHIKILRKVLSYPQ | |
| | VNIVKKTEEQTGGFSKESILPKGESDKLIPRKTKNSYWNPKKYGGFDSPVVAYSILVFADVEKGKSKKLRKVQDMVGITIMEKKRFEKNPVDFLEQRGYRNVRLEKIIKLPKYSLFELE | |
| | NKRRRLLASARELQKGNELVIPQRFTTLLYHSYQIEKNYEPEHREYVEKHKDEFKELLEYISVFSRKYVLADNNLTKIEMLFSKNKDAEVSSLAKSFISLLTFTAFGAPAAFNFFGENI | |
| | DRKRYTSVTECLNATLIHQSITGLYETRIDLSKLGED | |
| 297 | MNKAYTLGLDIGTNSVGWAVVTDDYRLMAKKMPVHSKMEKKKIKKNFWGARLFDEGQTAEERRNKRATRRRLRRRKYRILELQKIFSEEILKKDSHFFARLDESFLIPEDKQYARFPIF | WP_010750235.1 |
| | PTLLEEKAYYQNYPTIYHLRQKLADSTEKADIRLVYLALAHMIKYRGHFLFEGELDTENTSVEETFKEFIDIYNEQFEEGIIFYKDIPLILTDKLSKSKKVEKILQYYPKEKTTGCLAQ | [Enterococcus |
| | FLKLIVGNQGNFKQAFHLDEEVKIQISKETYEEDLEKLLRKSNEEMIDVFLQVKKVYDAILLSDILSTKMKDTKAKLSAG+IERYQNHKKDLEELKQFVRAHLHEKVTVFFKDSSKDGY | villorum] |
| | AGYIDGKTTQADFYKFLKKELTGVPGSEPMLAKIDQENFLLKQRTPTNGVIPHQVHLTEFKAIIDQQKQYYPFLEKSKEKMIQLLTFRIPYYVGPLAQDKETSSFAWLERKTTEKIKPW | |
| | NAKDVIDYGASATKFIQRMINYDTYLPTEKVLPKYSMLYQKYTIFNELTKVAYKDDRGIKHQFSSEEKLRIFQELFKKQRRVTKKKLQHFLSANYNIEDAEILGVDKVFNSSYATYHDF | |
| | LELAKPYTEKIIELLEQPEMEEMFEDIVKIITIFEDREMVRTQLKKYQRILGEEIFKKLVKKKYTGWGRLSKRLINGIRDQKTNKTILDYLINDDDFPYNRNRNFMQLINDDHLSFKEE | |
| | IAKELTLSDKQSLLEVVEAIPGSPAIKKGIWQTLKIVEELIAIIGYKPKNIVIEMARENQTTTGGKNRSKPRLKSLEEALKNFDSQLLKERPVDNQSLQKDRLYLYYLQNGKDMYTGES | |
| | LDIDRLSEYDIDHIIPRSFIVDHSLDNKVLVSSKENRLKKDDVPDSKVVKRMKAYWEKLLRANLISERKFSYLTKLELTDDDKARFIQRQLVETRQITKHVAAILHQYFNQTQELEKEK | |
| | DIRIITLKSSLVSQFRQVFGIHKVREINHHHHAHDAYLNAVVALALLKKYPRLAPEFVYGSFAKFHLVKENKATAKKEFYSNILKFFEKEEQFCDENGEIFWDKRKHIQQIKKVISSHQ | |
| | VNIVKKVEVQTGSFYKETVNTKEKPDKLIKRKNNWDVTKYGGFGSPVVAYAVVFTYEKGKNHKKAKAIEGITIMEQALFEKDPISFLIEKGYSNVNQFIKLPKYTLFELANGQRRMLAS | |
| | HQELQKANSFILPEKLVTLLYHANHYDEIAYKDSYDYVNEHFSNFQDILDKVIIFAEKYTSAPQKLNQIIATYEKNQEADRKIMAHSFVNLMQFNALGAPADFKFFDTTITRKRYTSLT | |
| | EIWQSTIIYQSVTGLYETRRRMADLWDGVQ | |
| 298 | MNKPYSIGLDIGTNSVGWSIITDDYKVPAKKIRVLGNTDKEYIKKNLIGALLFDGGNTAADRRLKRTARRRYTRRRNRILYLQEIFAEEMSKVDDSFFHRLEDSFLVEEDKRGSKYPIF | WP_001040076.1 |
| | ATLQEEKYYHEKFPTIYHLRKELADKKEKADLRLVYLALAHIIKFRGHFLIEDDRFDVRNTDIQKQYQAFLEIFDTTFENNDLLSQDVDVEAILTDKISKSAKKDRILAQYPNQKSTGI | [Streptococcus |
| | FAEFLKLIVGNQADFKKHFNLEDKTPLQFAKDSYDEDLENLLGQIGDEFADLFSAAKKLYDSVLLSGILTVTDLSTKAPLSASMIQRYDEHREDLKQLKQFVKASLPEKYQEIVADSSK | agalactiae] |
| | DGYAGYIEGKTNQEAFYKYLSKLLTKQEGSEYFLEKIKNEDFLRKQRTFDNGSIPHQVHLTELRAIIRRQSEYYPFLKENLDRIEKILTFRIPYYVGPLAREKSDFAWMTRKTDDSIRP | |
| | WNFEDLVDKEKSAEAFIHRMTNNDLYLPEEKVLPKHSLIYEKFTVYNELTKVRFLAEGFKDFQFLNRKQKETIFNSLFKEKRKVTEKDIISFLNKVDGYEGIAIKGIEKQFNASLSTYH | |
| | DLKKILGKDFLDNTDNELILEDIVQTLTLFEDREMIKKRLDIYKDFFTESQLKKLYRRHYTGWGRLSAKLINGIRNKENQKTILDYLIDDGSANRNFMQLIKDAGLSFKPIIDKARTGS | |
| | HSDNLKEVIGELAGSPAIKKGILQSLKIVDELVKVMGYEPEQIVVEMARENQTTAKGLSRSRQRLTTLRESLANLKSNILEEKKPKYVKDQVENHHLSDDRLFLYYLQNGKDMYTDDEL | |
| | DIDNLSQYDIDHIIPQAFIKDDSIDNRVLVSSAKNRGKSDDVPSLEIVKDCKVFWKKLLDAKLMSQRKYDNLTKAERGGLTSDDKARFIQRQLVETRQITKHVARILDERFNNELDSKG | |
| | RRIRKVKIVTLKSNLVSNFRKEFVFYKIREVNNYHHAHDAYLNAVVAKAILTKYPQLEPEFVYGDYPKYNSYKTRKSATEKLFFYSNIMNFFKTKVTLADGTVVVKDDIEVNNDTGEIV | |
| | WDKKKHFATVRKVLSYPQVNIVKKTEIQTGGFSKESILAHGNSDKLIPRKTKDIYLDPKKYGGFDSPIVAYSVLVVADIKKGKAQKLKTVTELLGITIMERSRFEKNPSAFLESKGYLN | |
| | IRTDKLIILPKYSLFELENGRRRLLASAGELQKGNELALPTQFMKFLYLASRYNESKGKPEEIEKKQEFVNQHVSYFDDIFQIINDFSKRVILADANLEKINRLYQDNKENIPVDELAN | |
| | NIINLFTFTSLGAPAAFKFFDKIVDRKRYTSTKEVLNSTLIHQSITGLYETRIDLGKLGED | |
| 299 | MNKPYSIGLDIGTNSVGWSIITDDYKVPAKKMRVLGNTDKEYIKKNLIGALLFDGGNTAADRRLKRTARRRYTRRRNRILYLQEIFAEEMSKVDDSFFHRLEDSFLVEEDKRGSKYPIF | WP_017649527.1 |
| | ATLQEEKDYHEKFPTIYHLRKELADKKEKADLRLIYIALAHIIKFRGHFLIEDDSFDVRNTDISKQYQDFLEIFNTTFENNDLLSQNVDVEAILTDKISKSAKKDRILAQYPNQKSTGI | [Streptococcus |
| | FAEFLKLIVGNQADFKKYFNLEDKTPLQFAKDSYDEDLENLLGQIGDEFADLFSAAKKLYDSVLLSGILTVIDLSTKAPLSASMIQRYDEHREDLKQLKQFVKASLPEKYQEIFADSSK | agalactiae] |
| | DGYAGYIEGKTNQEAFYKYLSKLLTKQEDSENFLEKIKNEDFLRKQRTFDNGSIPHQVHLTELKAIIRRQSEYYPFLKENQDRIEKILTFRIPYYIGPLAREKSDFAWMTRKTDDSIRP | |
| | WNFEDLVDKEKSAEAFIHRMTNNDFYLPEEKVLPKHSLIYEKFTVYNELTKVRYKNEQGETYFFDSNIKQEIFDGVFKEHRKVSKKKLLDFLAKEYEEFRIVDVIGLDKENKAFNASLG | |
| | TYHDLEKILDKDFLDNPDNESILEDIVQTLTLFEDREMIKKRLENYKDLFTESQLKKLYRRHYTGWGRLSAKLINGIRDKESQKTILDYLIDDGRSNRNFMQLINDDGLSFKSIISKAQ | |
| | AGSHSDNLKEVVGELAGSPAIKKGILQSLKIVDELVKVMGYEPEQIVVEMARENQTTNQGRRNSRQRYKLLDDGVKNLASDLNGNILKEYPTDNQALQNERLFLYYLQNGRDMYTGEAL | |
| | DIDNLSQYDIDHIIPQAFIKDDSIDNRVLVSSAKNRGKSDDVPSLEIVKDCKVFWKKLLDAKLMSQRKYDNLTKAERGGLTSDDKARFIQRQLVETRQITKHVARILDERFNNELDSKG | |
| | RRIRKVKIVTLKSNLVSNFRKEFGFYKIREVNNYHHAHDAYLNAVVAKAILTKYPQLEPEFVYGDYPKYNSYKTRKSATEKLFFYSNIMNFFKTKVTLADGTVVVKDDIEVNNDTGEIV | |
| | WDKKKHFATVRKVLSYPQNNIVKKTEIQTGGFSKESILAHGNSDKLIPRKTKDIYLDPKKYGGFDSPIVAYSVLVVADIKKGKAQKLKTVTELLGITIMERSRFEKNPSAFLESKGYLN | |
| | IRADKLIILPKYSLFELENGRRRLLASAGELQKGNELALPTQFMKFLYLASRYNESKGKPEEIEKKQEFVNQHVSYFDDILQLINDFSKRVILADANLEKINKLYQDNKENISVDELAN | |
| | NIINLFTFTSLGAPAAFKFFDKIVDRKRYTSTKEVLNSTLIHQSITGLYETRIDLGKLGED | |
| 300 | MNKPYSIGLDIGTNSVGWSIITDDYKVPAKKMRVLGNTDKEYIKKNLIGALLFDGGNTAADRRLKRTARRRYTRRRNRILYLQEIFAEEMSKVDDSFFHRLEDSFLVEEDKRGSKYPIF | WP_001040078.1 |
| | ATLQEEKDYHEKFPTIYHLRKELADKQEKADLRLIYLALAHIIKFRGHFLIEDDRFDVRNTDIQKQYQAFLEIFDTTFENNHLLSQNVDVEAILTDKISKSAKKDRILAQYPNQKSTGI | [Streptococcus |
| | FAEFLKLIVGNQADFKKHFNLEDKTPLQFAKDSYDEDLENLLGQIGDEFADLFSAAKKLYDSVLLSGILTVIDLSTKAPLSASMIQRYDEHREDLKQLKQFVKASLPEKYQEIFADSSK | agalactiae] |
| | DGYAGYIEGKTNQEAFYKYLSKLLTKQEDSENFLEKIKNEDFLRKQRTFDNGSIPHQVHLTELKAIIRRQSEYYPFLKENQDRIEKILTFRIPYYIGPLAREKSDFAWMTRKTDDSIRP | |
| | WNFEDLVDKEKSAEAFIHRMTNNDFYLPEEKVLPKHSLIYEKFTVYNELTKVRYKNEQGETYFFDSNIKQEIFDGVFKEHRKVSKKKLLDFLAKEYEEFRIVDVIGLDKENKAFNASLG | |
| | TYHDLEKILDKDFLDNPDNESILEDIVQTLTLFEDREMIKKRLENYKDLFTESQLKKLYRRHYTGWGRLSAKLINGIRDKESQKTILDYLIDDGRSNRNFMQLINDDGLSFKSIISKAQ | |
| | AGSHSDNLKEVVGELAGSPAIKKGILQSLKIVDELVKVMGYEPEQIVVEMARENQTTNQGRRNSRQRYKLLDDGVKNLASDLNGNILKEYPTDNQALQNERLFLYYLQNGRDMYTGEAL | |
| | DIDNLSQYDIDHIIPQAFIKDDSIDNRVLVSSAKNRGKSDDVPSLEIVKDCKVFWKKLLDAKLMSQRKYDNLTKAERGGLTSDDKARFIQRQLVETRQITKHVARILDERFNNELDSKG | |
| | RRIRKVKIVTLKSNLVSNFRKEFGFYKIREVNDYHHAHDAYLNAVVAKAILTKYPQLEPEFVYGLYRRKKLSKIVREDKEEKYSEATRKMFFYSNLMNMFKRVVRLADGSIVVRPVIET | |
| | GRYMGKTAWDKKKHFATVRKVLSYPQVNIVKKTEIQTGGFSKESILAHGNSDKLIPRKTKDIYLDPKKYGGFDSPIVAYSVLVVADIKKGKAQKLKTVTELLGITIMERSKFEKNPSAF | |
| | LESKGYLNIRDDKLMILPKYSLFELENGRRRLLASAGELQKGNELALPTQFMKFLYLASRYNESKGKPEEIEKKQEFVNQHVSYFDDILQLINDFSKRVILADANLEKINKLYQDNKEN | |
| | ISVDELANNIINLFTFTSLGAPAAFKFFDKIVDRKRYTSTKEVLNSTLIHQSITGLYETRIDLSKLGED | |
| 301 | MNKPYSIGLDIGTNSVGWSIITDDYKVPAKKMRVLGNTDKEYIKKNLIGALLFDGGNTAADRRLKRTARRRYTRRRNRILYLQEIFAEEMSKVDDSFFHRLEDSFLVEEDKRGSKYPIF | WP_001040080.1 |
| | ATLQEEKDYHEKFSTIYHLRKELADKKEKADLRLIYIALAHIIKFRGHFLIEDDSFDVRNTDISKQYQDFLEIFNITFENNDLLSQNVDVEAILTDKISKSAKKDRILAQYPNQKSTGI | [Streptococcus |
| | FAEFLKLIVGNQADFKKYFNLEDKTPLQFAKDSYDEDLENLLGQIGDEFADLFSAAKKLYDSVLLSGILTVIDLSTKAPLSASMIQRYDEHREDLKQLKQFVKASLPEKYQEIFADSSK | agalactiae] |
| | DGYAGYIEGKTNQEAFYKYLSKLLTKQEDSENFLEKIKNEDFLRKQRTFDNGSIPHQVHLTELKAIIRRQSEYYPFLKENQDRIEKILTFRIPYYIGPLAREKSDFAWMTRKTDDSIRP | |
| | WNFEDLVDKEKSAEAFIHRMTNNDFYLPEEKVLPKHSLIYEKFTVYNELTKVRYKNEQGETYFFDSNIKQEIFDGVFKEHRKVSKKKLLDFLAKEYEEFRIVDVIGLDKENKAFNASLG | |
| | TYHDLEKILDKDFLDNPDNESILEDIVQTLTLFEDREMIKKRLENYKDLFTESQLKKLYRRHYTGWGRLSAKLINGIRDKESQKTILDYLIDDGRSNRNFMQLINDDGLSFKSIISKAQ | |
| | AGSHSDNLKEVVGELAGSPAIKKGILQSLKIVDELVKVMGYEPEQIVVEMARENQTTNQGRRNSRQRYKLLDDGVKNLASDLNGNILKEYPTDNQALQNERLFLYYLQNGRDMYTGEAL | |
| | DIDNLSQYDIDHIIPQAFIKDDSIDNRVLVSSAKNRGKSDDVPSLEIVKDCKVFWKKLLDAKLMSQRKYDNLTKAERGGLTSDDKARFIQRQLVETRQITKHVARILDERFNNELDSKG | |
| | RRIRKVKIVTLKSNLVSNFRKEFGFYKIREVNNYHHAHDAYLNAVVAKAILTKYPQLEPEFVYGDYPKYNSYKTRKSATEKLFFYSNIMNFFKTKVTLADGTVVVKDDIEVNNDTGEIV | |
| | WDKKKHFATVRKVLSYPQNNIVKKTEIQTGGFSKESILAHGNSDKLIPRKTKDIYLDPKKYGGFDSPIVAYSVLVVADIKKGKAQKLKTVTELLGITIMERSRFEKNPSAFLESKGYLN | |
| | IRADKLIILPKYSLFELENGRRRLLASAGELQKGNELALPTQFMKFLYLASRYNESKGKPEEIEKKQEFVNQHVSYFDDILQLINDFSKRVILADANLEKINKLYQDNKENISVDELAN | |
| | NIINLFTFTSLGAPAAFKFFDKIVDRKRYTSTKEVLNSTLIHQSITGLYETRIDLGKLGED | |
| 302 | MNKPYSIGLDIGTNSVGWSIITDDYKVPAKKMRVLGNTDKEYIKKNLIGALLFDGGNTAADRRLKRTARRRYTRRRNRILYLQEIFAEEMSKVDDSFFHRLEDSFLVEEDKRGSKYPIF | WP_001040081.1 |
| | ATLQEEKDYHEKFSTIYHLRKELADKKEKADLRLIYIALAHIIKFRGHFLIEDDSFDVRNTDISKQYQDFLEIFNTIFENNDLLSQNVDVEAILTDKISKSAKKDRILAQYPNQKSTGI | [Streptococcus |
| | FAEFLKLIVGNQADFKKYFNLEDKTPLQFAKDSYDEDLENLLGQIGDEFADLFSAAKKLYDSVLLSGILTVIDLSTKAPLSASMIQRYDEHREDLKQLKQFVKASLPEKYQEIFADSSK | agalactiae] |
| | DGYAGYIEGKTNQEAFYKYLSKLLTKQEDSENFLEKIKNEDFLRKQRTFDNGSIPHQVHLTELKAIIRRQSEYYPFLKENQDRIEKILTFRIPYYIGPLAREKSDFAWMTRKTDDSIRP | |
| | WNFEDLVDKEKSAEAFIHRMTNNDFYLPEEKVLPKHSLIYEKFTVYNELTKVRYKNEQGETYFFDSNIKQEIFDGVFKEHRKVSKKKLLDFLAKEYEEFRIVDVIGLDKENKAFNASLG | |
| | TYHDLEKILDKDFLDNPDNESILEDIVQTLTLFEDREMIKKRLENYKDLFTESQLKKLYRRHYTGWGRLSAKLINGIRDKESQKTILDYLIDDGRSNRNFMQLINDDGLSFKSIISKAQ | |
| | AGSHSDNLKEVVGELAGSPAIKKGILQSLKIVDELVKVMGYEPEQIVVEMARENQTTNQGRRNSRQRYKLLDDGVKNLASDLNGNILKEYPTDNQALQNERLFLYYLQNGRDMYTGEAL | |
| | DIDNLSQYDIDHIIPQAFIKDDSIDNRVLVSSAKNRGKSDDVPSLEIVKDCKVFWKKLLDAKLMSQRKYDNLTKAERGGLTSDDKARFIQRQLVETRQITKHVARILDERFNNELDSKG | |
| | RRIRKVKIVTLKSNLVSNFRKEFGFYKIREVNNYHHAHDAYLNAVVAKAILTKYPQLEPEFVYGDYPKYNSYKTRKSATEKLFFYSNIMNFFKTKVTLADGTVVVKDDIEVNNDTGEIV | |
| | WDKKKHFATVRKVLSYPQNNIVKKTEIQTGGFSKESILAHGNSDKLIPRKTKDIYLDPKKYGGFDSPIVAYSVLVVADIKKGKAQKLKTVTELLGITIMERSRFEKNPSAFLESKGYLN | |
| | IRADKLIILPKYSLFELENGRRRLLASAGELQKGNELALPTQFMKFLYLASRYNESKGKPEEIEKKQEFVNQHVSYFDDILQLINDFSKRVILADANLEKINKLYQDNKENISVDELAN | |
| | NIINLFTFTSLGAPAAFKFFDKIVDRKRYTSTKEVLNSTLIHQSITGLYETRIDLGKLGED | |
| 303 | MNKPYSIGLDIGTNSVGWSIITDDYKVPAKKMRVLGNTDKEYIKKNLIGALLFDGGNTAADRRLKRTARRRYTRRRNRILYLQEIFAEEMSKVDDSFFHRLEDSFLVEEDKRGSKYPIF | WP_001040083.1 |
| | ATLQEEKDYHEKFSTIYHLRKELADKKEKADLRLIYIALAHIIKFRGHFLIEDDSFDVRNTDISKQYQDFLEIFNTTFENNDLLSQNVDVEAILTDKISKSAKKDRILAQYPNQKSTGI | [Streptococcus |
| | FAEFLKLIVGNQADFKKYFNLEDKTPLQFAKDSYDEDLENLLGQIGDEFADLFSAAKKLYDSVLLSGILTVIDLSTKAPLSASMIQRYDEHREDLKQLKQFVKASLPEKYQEIFADSSK | agalactiae] |
| | DGYAGYIEGKTNQEAFYKYLSKLLTKQEDSENFLEKIKNEDFLRKQRTFDNGSIPHQVHLTELKAIIRRQSEYYPFLKENQDRIEKILTFRIPYYIGPLAREKSDFAWMTRKTDDSIRP | |
| | WNFEDLVDKEKSAEAFIHRMTNNDFYLPEEKVLPKHSLIYEKFTVYNELTKVRYKNEQGETYFFDSNIKQEIFDGVFKEHRKVSKKKLLDFLAKEYEEFRIVDVIGLDKENKAFNASLG | |
| | TYHDLEKILDKDFLDNPDNESILEDIIQTLTLFEDREMIKKRLENYKDLFTESQLKKLYRRHYTGWGRLSAKLINGIRDKESQKTILDYLIDDGRSNRNFMQLINDDGLSFKSIISKAQ | |
| | AGSHSDNLKEVVGELAGSPAIKKGILQSLKIVDELVKVMGYEPEQIVVEMARENQTTNQGRRNSRQRYKLLDDGVKNLASDLNGNILKEYPTDNQALQNERLFLYYLQNGRDMYTGEAL | |
| | DIDNLSQYDIDHIIPQAFIKDDSIDNRVLVSSAKNRGKSDDVPSLEIVKDCKVFWKKLLDAKLMSQRKYDNLTKAERGGLTSDDKARFIQRQLVETRQITKHVARILDERFNNELDSKG | |
| | RRIRKVKIVTLKSNLVSNFRKEFGFYKIREVNNYHHAHDAYLNAVVAKAILTKYPQLEPEFVYGDYPKYNSYKTRKSATEKLFFYSNIMNFFKTKVTLADGTVVVKDDIEVNNDTGEIV | |
| | WDKKKHFATVRKVLSYPQNNIVKKTEIQTGGFSKESILAHGNSDKLIPRKTKDIYLDPKKYGGFDSPIVAYSVLVVADIKKGKAQKLKTVTELLGITIMERSRFEKNPSAFLESKGYLN | |
| | IRADKLIILPKYSLFELENGRRRLLASAGELQKGNELALPTQFMKFLYLASRYNESKGKPEEIEKKQEFVNQHVSYFDDILQLINDFSKRVILADANLEKINKLYQDNKENISVDELAN | |
| | NIINLFTFTSLGAPAAFKFFDKIVDRKRYTSTKEVLNSTLIHQSITGLYETRIDLGKLGED | |
| 304 | MNKPYSIGLDIGTNSVGWSIITDDYKVPAKKMRVLGNTDKEYIKKNLIGALLFDGGNTAADRRLKRTARRRYTRRRNRILYLQEIFAEEMSKVDDSFFHRLEDSFLVEEDKRGSKYPIF | WP_001040085.1 |
| | ATLQEEKDYHEKFSTIYHLRKELADKKEKADLRLIYIALAHIIKFRGHFLIEDDSFDVRNTDISKQYQDFLEIFNTTFENNDLLSQNVDVEAILTDKISKSAKKDRILAQYPNQKSTGI | [Streptococcus |
| | FAEFLKLIVGNQADFKKYFNLEDKTPLQFAKDSYDEDLENLLGQIGDEFADLFSAAKKLYDSVLLSGILTVIDLSTKAPLSASMIQRYDEHREDLKQLKQFVKASLPEKYQEIFADSSK | agalactiae] |
| | DGYAGYIEGKTNQEAFYKYLSKLLTKQEDSENFLEKIKNEDFLRKQRTFDNGSIPHQVHLTELKAIIRRQSEYYPFLKENQDRIEKILTFRIPYYIGPLAREKSDFAWMTRKTDDSIRP | |
| | WNFEDLVDKEKSAEAFIHRMTNNDFYLPEEKVLPKHSLIYEKFTVYNELTKVRYKNEQGETYFFDSNIKQEIFDGVFKEHRKVSKKKLLDFLAKEYEEFRIVDVIGLDKENKAFNASLG | |
| | TYHDLEKILDKDFLDNPDNESILEDIVQTLTLFEDREMIKKRLENYKDLFTESQLKKLYRRHYTGWGRLSAKLINGIRDKESQKTILDYLIDDGRSNRNFMQLINDDGLSFKSIISKAQ | |
| | AGSHSDNLKEVVGELAGSPAIKKGILQSLKIVDELVKVMGYEPEQIVVEMARENQTTNQGRRNSRQRYKLLDDGVKNLASDLNGNILKEYPTDNQALQNERLFLYYLQNGRDMYTGEAL | |
| | DIDDLSQYDIDHIIPQAFIKDDSIDNRVLVSSAKNRGKSDDVPSLEIVKDCKVFWKKLLDAKLMSQRKYDNLTKAERGGLTSDDKARFIQRQLVETRQITKHVARILDERFNNELDSKG | |
| | RRIRKVKIVTLKSNLVSNFRKEFGFYKIREVNNYHHAHDAYLNAVVAKAILTKYPQLEPEFVYGDYPKYNSYKTRKSATEKLFFYSNIMNFFKTKVTLADGTVVVKDDIEVNNDTGEIV | |
| | WDKKKHFATVRKVLSYPQNNIVKKTEIQTGGFSKESILAHGNSDKLIPRKTKDIYLDPKKYGGFDSPIVAYSVLVVADIKKGKAQKLKTVTELLGITIMERSRFEKNPSAFLESKGYLN | |
| | IRADKLIILPKYSLFELENGRRRLLASAGELQKGNELALPTQFMKFLYLASRYNESKGKPEEIEKKQEFVNQHVSYFDDILQLINDFSKRVILADANLEKINKLYQDNKENISVDELAN | |
| | NIINLFTFTSLGAPAAFKFFDKIVDRKRYTSTKEVLNSTLIHQSITGLYETRIDLGKLGED | |
| 305 | MNKPYSIGLDIGTNSVGWSIITDDYKVPAKKMRVLGNTDKEYIKKNLIGALLFDGGNTAADRRLKRTARRRYTRRRNRILYLQEIFAEEMSKVDDSFFHRLEDSFLVEEDKRGSKYPIF | WP_001040087.1 |
| | ATLQEEKDYHEKFSTIYHLRKELADKKEKADLRLIYIALAHIIKFRGHFLIEDDSFDVRNTDISKQYQDFLEIFNTTFENNDLLSQNVDVEAILTDKISKSAKKDRILAQYPNQKSTGI | [Streptococcus |
| | FAEFLKLIVGNQADFKKYFNLEDKTPLQFAKDSYDEDLENLLGQIGDEFADLFSAAKKLYDSVLLSGILTVIDLSTKAPLSASMIQRYDEHREDLKQLKQFVKASLPEKYQEIFADSSK | agalactiae] |
| | DGYAGYIEGKTNQEAFYKYLSKLLTKQEDSENFLEKIKNEDFLRKQRTFDNGSIPHQVHLTELKAIIRRQSEYYPFLKENQDRIEKILTFRIPYYIGPLAREKSDFAWMTRKTDDSIRP | |
| | WNFEDLVDKEKSAEAFIHRMTNNDFYLPEEKVLPKHSLIYEKFTVYNELTKVRYKNEQGETYFFDSNIKQEIFDGVFKEHRKVSKKKLLDFLAKEYEEFRIVDVIGLDKENKAFNASLG | |
| | TYHDLEKILDKDFLDNPDNESILEDIVQTLTLFEDREMIKKRLENYKDLFTESQLKKLYRRHYTGWGRLSAKLINGIRDKESQKTILDYLIDDGRSNRNFMQLINDDGLSFKSIISKAQ | |
| | AGSHSDNLKEVVGELAGSPAIKKGILQSLKIVDELVKVMGYEPEQIVVEMARENQTTNQGRRNSRQRYKLLDDGVKNLASDLNGNILKEYPTDNQALQNERLFLYYLQNGRDMYTGEAL | |
| | DIDNLSQYDIDHIIPQAFIKDDSIDNRVLVSSAKNRGKSDDVPSLEIVKDCKVFWKKLLDAKLMSQRKYDNLTKAERGGLTSDDKARFIQRQLVETRQITKHVARILDERFNNELDSKG | |
| | RRIRKVKIVTLKSNLVSNFRKEFGFYKIREVNNYHHAHDAYLNAVVAKAILTKYPQLEPEFVYGDYPKYNSYKTRKSATEKLFFYSNIMNFFKTKVTLADGTVVVKDDIEVNNDTGEIV | |
| | WDKKKHFATVRKVLSYPQNNIVKKTEIQTGGFSKESILAHGNSDKLIPRKTKDIYLDPKKYGGFDSPIVAYSVLVVADIKKGKAQKLKTVTELLGITIMERSRFEKNPSAFLESKGYLN | |
| | IRADKLIILPKYSLFELENGRRRLLASAGELQKGNELALPTQFMKFLYLASRYNESKGKPEEIEKKQEFVNQHVSYFDDILQLINDFSKRVILADANLEKINKLYQDNKENISVDELAN | |
| | NIINLFTFTSLGAPAAFKFFDKIVDRKRYTSTKEVLNSTLIHQSITGLYETRIDLGKLGED | |
| 306 | MNKPYSIGLDIGTNSVGWSIITDDYKVPAKKMRVLGNTDKEYIKKNLIGALLFDGGNTAADRRLKRTARRRYTRRRNRILYLQEIFAEEMSKVDDSFFHRLEDSFLVEEDKRGSKYPIF | WP_001040088.1 |
| | ATLQEEKDYHEKFSTIYHLRKELADKKEKADLRLIYIALAHIIKFRGHFLIEDDSFDVRNTDISKQYQDFLEIFNTTFENNDLLSQNVDVEAILTDKISKSAKKDRILAQYPNQKSTGI | [Streptococcus |
| | FAEFLKLIVGNQADFKKYFNLEDKTPLQFAKDSYDEDLENLLGQIGDEFADLFSAAKKLYDSVLLSGILTVIDLSTKAPLSASMIQRYDEHREDLKQLKQFVKASLPEKYQEIFADSSK | agalactiae] |
| | DGYAGYIEGKTNQEAFYKYLSKLLTKQEDSENFLEKIKNEDFLRKQRTFDNGSIPHQVHLTELKAIIRRQSEYYPFLKENQDRIEKILTFRIPYYIGPLAREKSDFAWMTRKTDDSIRP | |
| | WNFEDLVDKEKSAEAFIHRMTNNDFYLPEEKVLPKHSLIYEKFTVYNELTKVRYKNEQGETYFFDSNIKQEIFDGVFKEHRKVSKKKLLDFLAKEYEEFRIVDVIGLDKENKAFNASLG | |
| | TYHDLEKILDKDFLDNPDNESILEDIVQTLTLFEDREMIKKRLENYKDLFTESQLKKLYRRHYTGWGRLSAKLINGIRDKESQKTILDYLIDDGRSNRNFMQLINDDGLSFKSIISKAQ | |
| | AGSHSDNLKEVVGELAGSPAIKKGILQSLKIVDELVKVMGYEPEQIVVEMARENQTTNQGRRNSRQRYKLLDDGVKNLASDLNGNILKEYPTDNQALQNERLFLYYLQNGRDMYTGEAL | |
| | DIDNLSQYDIDHIIPQAFIKDDSIDNRVLVSSAKNRGKSDDVPSLEIVKDCKVFWKKLLDAKLMSQRKYDNLTKAERGGLTSDDKARFIQRQLVETRQITKHVARILDERFNNELDSKG | |
| | RRIRKVKIVTLKSNLVSNFRKEFGFYKIREVNNYHHAHDAYLNAVVAKAILTKYPQLEPEFVYGDYPKYNSYKTRKSATEKLFFYSNIMNFFKTKVTLADGTVVVKDDIEVNNDTGEIV | |
| | WDKKKHFATVRKVLSYPQNNIVKKTEIQTGGFSKESILAHGNSDKLIPRKTKDIYLDPKKYGGFDSPIVAYSVLVVADIKKGKAQKLKTVTELLGITIMERSRFEKNPSAFLESKGYLN | |
| | IRADKLIILPKYSLFELENGRRRLLASAGELQKGNELALPTQFMKFLYLASRYNESKGKPEEIEKKQEFVNQHVSYFDDILQLINDFSKRVILADANLEKINKLYQDNKENISVDELAN | |
| | NIINLFTFTSLGAPAAFKFFDKIVDRKRYTSTKEVLNSTLIHQSITGLYETRIDLGKLGGD | |
| 307 | MNKPYSIGLDIGTNSVGWSIITDDYKVPAKKMRVLGNTDKEYIKKNLIGALLFDGGNTAADRRLKRTARRRYTRRRNRILYLQEIFAEEMSKVDDSFFHRLEDSFLVEEDKRGSKYPIF | WP_001040089.1 |
| | ATLQEEKDYHEKFSTIYHLRKELADKKEKADLRLIYIALAHIIKFRGHFLIEDDSFDVRNTDISKQYQDFLEIFNTTFENNDLLSQNVDVEAILTDKISKSAKKDRILAQYPNQKSTGI | [Streptococcus |
| | FAEFLKLIVGNQADFKKYFNLEDKTPLQFAKDSYDEDLENLLGQIGDEFADLFSAAKKLYDSVLLSGILTVIDLSTKAPLSASMIQRYDEHREDLKQLKQFVKASLPEKYQEIFADSSK | agalactiae] |
| | DGYAGYIEGKTNQEAFYKYLSKLLTKQEDSENFLEKIKNEDFLRKQRTFDNGSIPHQVHLTELKAIIRRQSEYYPFLKENQDRIEKILTFRIPYYIGPLAREKSDFAWMTRKTDDSIRP | |
| | WNFEDLVDKEKSAEAFIHRMTNNDFYLPEEKVLPKHSLIYEKFTVYNELTKVRYKNEQGETYFFDSNIKQEIFDGVFKEHRKVSKKKLLDFLAKEYEEFRIVDVIGLDKENKAFNASLG | |
| | TYHDLEKILDKDFLDNPDNESILEDIVQTLTLFEDREMIKKRLENYKDLFTESQLKKLYRRHYTGWGRLSAKLINGIRDKESQKTILDYLIDDGRSNRNFMQLINDDGLSFKSIISKAQ | |
| | AGSHSDNLKEVVGELAGSPAIKKGILQSLKIVDELVKVMGYEPEQIVVEMARENQTTNQGRRNSRQRYKLLDDGVKNLASDLNGNILKEYPTDNQALQNERLFLYYLQNGRDMYTGEAL | |
| | DIDNLSQYDIDHIIPQAFIKDDSIDNRVLVSSAKNRGKSDDVPSLEIVKDCKVFWKKLLDAKLMSQRKYDNLTKAERGGLTSDDKARFIQRQLVETRQITKHVARILDERFNNELDSKG | |
| | RRIRKVKIVTLKSNLVSNFRKEFGFYKIREVNNYHHAHDAYLNAVVAKAILTKYPQLEPEFVYGDYPKYNSYKTRKSATEKLFFYSNIMNFFKTKVTLADGTVVVKDDIEVNNDTGEIV | |
| | WDKKKHFATVRKVLSYPQNNIVKKTEIQTGGFSKESILAHGNSDKLIPRKTKDIYLDPKKYGGFDSPIVAYSVLVVADIKKGKAQKLKTVTELLGITIMERSRFEKNPSAFLESKGYLN | |
| | IRDDKLMILPKYSLFELENGRRRLLASAGELQKGNELALPTQFMKFLYLASRYNESKGKPEEIEKKQEFVNQHVSYFDDILQLINDFSKRVILADANLEKINKLYQDNKENISVDELAN | |
| | NIINLFTFTSLGAPAAFKFFDKIVDRKRYTSTKEVLNSTLIHQSITGLYETRIDLGKLGED | |
| 308 | MNKPYSIGLDIGTNSVGWSIITDDYKVPAKKMRVLGNTDKEYIKKNLIGALLFDGGNTAADRRLKRTARRRYTRRRNRILYLQEIFAEEMSKVDDSFFHRLEDSFLVEEDKRGSKYPIF | WP_001040090.1 |
| | ATLQEEKDYHEKFSTIYHLRKELADKKEKADLRLIYIALAHIIKFRGHFLIEDDSFDVRNTDISKQYQDFLEIFNTTFENNDLLSQNVDVEAILTDKISKSAKKDRILAQYPNQKSTGI | [Streptococcus |
| | FAEFLKLIVGNQADFKKYFNLEDKTPLQFAKDSYDEDLENLLGQIGDEFADLFSAAKKLYDSVLLSGILTVIDLSTKAPLSASMIQRYDEHREDLKQLKQFVKASLPEKYQEIFADSSK | agalactiae] |
| | DGYAGYIEGKTNQEAFYKYLSKLLTKQEDSENFLEKIKNEDFLRKQRTFDNGSIPHQVHLTELKAIIRRQSEYYPFLKENQDRIEKILTFRIPYYIGPLAREKSDFAWMTRKTDDSIRP | |
| | WNFEDLVDKEKSAEAFIHRMTNNDFYLPEEKVLPKHSLIYEKFTVYNELTKVRYKNEQGETYFFDSNIKQEIFDGVFKEHRKVSKKKLLDFLAKEYEEFRIVDVIGLDKENKAFNASLG | |
| | TYHDLEKILDKDFLDNPDNESILEDIVQTLTLFEDREMIKKRLENYKDLFTESQLKKLYRRHYTGWGRLSAKLINGIRDKESQKTILDYLIDDGRSNRNFMQLINDDGLSFKSIISKAQ | |
| | AGSHSDNLKEVVGELAGSPAIKKGILQSLKIVDELVKVVGYEPEQIVVEMARENQTTNQGRRNSRQRYKLLDDGVKNLASDLNGNILKEYPTDNQALQNERLFLYYLQNGRDMYTGEAL | |
| | DIDNLSQYDIDHIIPQAFIKDDSIDNRVLVSSAKNRGKSDDVPSLEIVKDCKVFWKKLLDAKLMSQRKYDNLTKAERGGLTSDDKARFIQRQLVETRQITKHVARILDERFNNELDSKG | |
| | RRIRKVKIVTLKSNLVSNFRKEFGFYKIREVNNYHHAHDAYLNAVVAKAILTKYPQLEPEFVYGDYPKYNSYKTRKSATEKLFFYSNIMNFFKTKVTLADGTVVVKDDIEVNNDTGEIV | |
| | WDKKKHFATVRKVLSYPQNNIVKKTEIQTGGFSKESILAHGNSDKLIPRKTKDIYLDPKKYGGFDSPIVAYSVLVVADIKKGKAQKLKTVTELLGITIMERSRFEKNPSAFLESKGYLN | |
| | IRADKLIILPKYSLFELENGRRRLLASAGELQKGNELALPTQFMKFLYLASRYNESKGKPEEIEKKQEFVNQHVSYFDDILQLINDFSKRVILADANLEKINKLYQDNKENISVDELAN | |
| | NIINLFTFTSLGAPAAFKFFDKIVDRKRYTSTKEVLNSTLIHQSITGLYETRIDLGKLGED | |
| 309 | MNKPYSIGLDIGTNSVGWSIITDDYKVPAKKMRVLGNTDKEYIKKNLIGALLFDGGNTAADRRLKRTARRRYTRRRNRILYLQEIFAEEMSKVDDSFFHRLEDSFLVEEDKRGSKYPIF | WP_001040091.1 |
| | ATLQEEKDYHEKFSTIYHLRKELADKKEKADLRLIYIALAHIIKFRGHFLIEDDSFDVRNTDISKQYQDFLEIFNTTFENNDLLSQNVDVEAILTDKISKSAKKDRILAQYPNQKSTGI | [Streptococcus |
| | FAEFLKLIVGNQADFKKYFNLEDKTPLQFAKDSYDEDLENLLRQIGDEFADLFSAAKKLYDSVLLSGILTVIDLSTKAPLSASMIQRYDEHREDLKQLKQFVKASLPEKYQEIFADSSK | agalactiae] |
| | DGYAGYIEGKTNQEAFYKYLSKLLTKQEDSENFLEKIKNEDFLRKQRTFDNGSIPHQVHLTELKAIIRRQSEYYPFLKENQDRIEKILTFRIPYYIGPLAREKSDFAWMTRKTDDSIRP | |
| | WNFEDLVDKEKSAEAFIHRMTNNDFYLPEEKVLPKHSLIYEKFTVYNELTKVRYKNEQGETYFFDSNIKQEIFDGVFKEHRKVSKKKLLDFLAKEYEEFRIVDVIGLDKENKAFNASLG | |
| | TYHDLEKILDKDFLDNPDNESILEDIVQTLTLFEDREMIKKRLENYKDLFTESQLKKLYRRHYTGWGRLSAKLINGIRDKESQKTILDYLIDDGRSNRNFMQLINDDGLSFKSIISKAQ | |
| | AGSHSDNLKEVVGELAGSPAIKKGILQSLKIVDELVKVMGYEPEQIVVEMARENQTTNQGRRNSRQRYKLLDDGVKNLASDLNGNILKEYPTDNQALQNERLFLYYLQNGRDMYTGEAL | |
| | DIDNLSQYDIDHIIPQAFIKDDSIDNRVLVSSAKNRGKSDDVPSLEIVKDCKVFWKKLLDAKLMSQRKYDNLTKAERGGLTSDDKARFIQRQLVETRQITKHVARILDERFNNELDSKG | |
| | RRIRKVKIVTLKSNLVSNFRKEFGFYKIREVNNYHHAHDAYLNAVVAKAILTKYPQLEPEFVYGDYPKYNSYKTRKSATEKLFFYSNIMNFFKTKVTLADGTVVVKDDIEVNNDTGEIV | |
| | WDKKKHFATVRKVLSYPQNNIVKKTEIQTGGFSKESILAHGNSDKLIPRKTKDIYLDPKKYGGFDSPIVAYSVLVVADIKKGKAQKLKTVTELLGITIMERSRFEKNPSAFLESKGYLN | |
| | IRADKLIILPKYSLFELENGRRRLLASAGELQKGNELALPTQFMKFLYLASRYNESKGKPEEIEKKQEFVNQHVSYFDDILQLINDFSKRVILADANLEKINKLYQDNKENISVDELAN | |
| | NIINLFTFTSLGAPAAFKFFDKIVDRKRYTSTKEVLNSTLIHQSITGLYETRIDLGKLGED | |
| 310 | MNKPYSIGLDIGTNSVGWSIITDDYKVPAKKMRVLGNTDKEYIKKNLIGALLFDGGNTAADRRLKRTARRRYTRRRNRILYLQEIFAEEMSKVDDSFFHRLEDSFLVEEDKRGSKYPIF | WP_017771984.1 |
| | ATLQEEKDYHEKFSTIYHLRKELADKKEKADLRLIYIALAHIIKFRGHFLIEDDSFDVRNTDISKQYQDFLEIFNTTFENNDLLSQNVDVEAILTDKISKSAKKDRILAQYPNQKSTGI | [Streptococcus |
| | FAEFLKLIVGNQADFKKYFNLEDKTPLQFAKDSYDEDLENLLGQIGDEFADLFSAAKKLYDSVLLSGILTVIDLSTKAPLSASMIQRYDEHREDLKQLKQFVKASLPEKYQEIFADSSK | agalactiae] |
| | DGYAGYIEGKTNQEAFYKYLSKLLTKQEDSENFLEKIKNEDFLRKQRTFDNGSIPHQVHLTELKAIIRRQSEYYPFLKENQDRIEKILTFRIPYYIGPLAREKSDFAWMTRKTDDSIRP | |
| | WNFEDLVDKEKSAEAFIHRMTNNDFYLPEEKVLPKHSLIYEKFTVYNELTKVRYKNEQGETYFFDSNIKQEIFDGVFKEHRKVSKKKLLDFLAKEYEEFRIVDVIGLDKENKAFNASLG | |
| | TYHDLEKILDKDFLDNPDNESILEDIVQTLTLFEDREMIKKRLENYKDLFTESQLKKLYRRHYTGWGRLSAKLINGIRDKESQKTILDYLIDDGRSNRNFMQLINDDGLSFKSIISKAQ | |
| | AGSHSDNLKEVVGELAGSPAIKKGILQSLKIVDELVKVMGYEPEQIVVEMARENQTTNQGRRNSRQRYKLLDDGVKNLASDLNGNILKEYPTDNQALQNERLFLYYLQNGRDMYTGEAL | |
| | DIDNLSQYDIDHIIPQAFIKDDSIDNRVLVSSAKNRGKSDDVPSLEIVKDCKVFWKKLLDAKLMSQRKYDNLTKAERGGLTSDDKARFIQRQLVETRQITKHVARILDERFNNELDSKG | |
| | RRIRKVKIVTLKSNLVSNFRKEFGFYKIREVNNYHHAHDAYLNAVVAKAILTKYPQLEPEFVYGDYPKYNSYKTRKSATEKLFFYSNIMNFFKTKVTLADGTVVVKDDIEVNNDTGEIV | |
| | WDKKKHFATVRKVLSYPQNNIVKKTEIQTGGFSKESILAHGNSDKLIPRKTKDIYLDPKKYGGFDSPIVAYSVLVAADIKKGKAQKLKTVTELLGITIMERSRFEKNPSAFLESKGYLN | |
| | IRADKLIILPKYSLFELENGRRRLLASAGELQKGNELALPTQFMKFLYLASRYNESKGKPEEIEKKQEFVNQHVSYFDDILQLINDFSKRVILADANLEKINKLYQDNKENISVDELAN | |
| | NIINLFTFTSLGAPAAFKFFDKIVDRKRYTSTKEVLNSTLIHQSITGLYETRIDLGKLGED | |
| 311 | MNKPYSIGLDIGTNSVGWSIITDDYKVPAKKMRVLGNTDKEYIKKNLIGALLFDGGNTAADRRLKRTARRRYTRRRNRILYLQEIFAEEMSKVDDSFFHRLEDSFLVEEDKRGSKYPIF | WP_050198062.1 |
| | ATLQEEKDYHEKFSTIYHLRKELADKKEKADLRLIYIALAHIIKFRGHFLIEDDSFDVRNTDISKQYQDFLEIFNTTFENNDLLSQNVDVEAILTDKISKSAKKDRILAQYPNQKSTGI | [Streptococcus |
| | FAEFLKLIVGNQADFKKYFNLEDKTPLQFAKDSYDEDLENLLGQIGDEFADLFSAAKKLYDSVLLSGILTVIDLSTKAPLSASMIQRYDEHREDLKQLKQFVKASLPEKYQEIFADSSK | agalactiae] |
| | DGYAGYIEGKTNQEAFYKYLSKLLTKQEDSENFLEKIKNEDFLRKQRTFDNGSIPHQVHLTELKAIIRRQSEYYPFLKENQDRIEKILTFRIPYYIGPLAREKSDFAWMTRKTDDSIRP | |
| | WNFEDLVDKEKSAEAFIHRMTNNDFYLPEEKVLPKHSLIYEKFTVYNELTKVRYKNEQGETYFFDSNIKQEIFDGVFKEHRKVSKKKLLDFLAKEYEEFRIVDVIGLDKENKAFNASLG | |
| | TYHDLEKILDKDFLDNPDNESILEDIVQTLTLFEDREMIKKRLENYKDLFTESQLKKLYRRHYTGWGRLSAKLINGIRDKESQKTILDYLIDDGRSNRNFMQLINDDGLSFKSIISKAQ | |
| | AGSHSDNLKEVVGELAGSPAIKKGILQSLKIVDELVKVMGYEPEQIVVEMARENQTTNQGRRNSRQRYKLLDDGVKNLASDLNGNILKEYPTDNQALQNERLFLYYLQNGRDMYTGEAL | |
| | DIDNLSQYDIDHIIPQAFIKDDSIDNRVLVSSAKNRGKSDDVPSLEIVKDCKVFWKKLLDAKLMSQRKYDNLTKAERGGLTSDDKARFIQRQLVETRQITKHVARILDERFNNELDSKG | |
| | RRIRKVKIVTLKSNLVSNFRKEFGFYKIREVNNYHHAHDAYLNAVVAKAILTKYPQLEPEFVYGDYPKYNSYKTRKSATEKLFFYSNIMNFFKTKVTLADGTVVIKDDIEVNNDTGEIV | |
| | WDKKKHFATVRKVLSYPQNNIVKKTEIQTGGFSKESILAHGNSDKLIPRKTKDIYLDPKKYGGFDSPIVAYSVLVVADIKKGKAQKLKTVTELLGITIMERSRFEKNPSAFLESKGYLN | |
| | IRADKLIILPKYSLFELENGRRRLLASAGELQKGNELALPTQFMKFLYLASRYNESKGKPEEIEKKQEFVNQHVSYFDDILQLINDFSKRVILADANLEKINKLYQDNKENISVDELAN | |
| | NIINLFTFTSLGAPAAFKFFDKIVDRKRYTSTKEVLNSTLIHQSITGLYETRIDLGKLGED | |
| 312 | MNKPYSIGLDIGTNSVGWSIITDDYKVPAKKMRVLGNTDKEYIKKNLIGALLFDGGNTAADRRLKRTARRRYTRRRNRILYLQEIFAEEMSKVDDSFFHRLEDSFLVEEDKRGSKYPIF | WP_050201642.1 |
| | ATLQEEKDYHEKFSTIYHLRKELADKKEKADLRLIYIALAHIIKFRGHFLIEDDSFDVRNTDISKQYQDFLEIFNTTFENNDLLSQNVDVEAILTDKISKSAKKDRILAQYPNQKSTGI | [Streptococcus |
| | FAEFLKLIVGNQADFKKYFNLEDKTPLQFAKDSYDEDLENLLGQIGDEFADLFSAAKKLYDSVLLSGILTVIDLSTKAPLSASMIQRYDEHREDLKQLKQFVKASLPEKYQEIFADSSK | agalactiae] |
| | DGYAGYIEGKTNQEAFYKYLSKLLTKQEDSENFLEKIKNEDFLRKQRTFDNGSIPHQVHLTELKAIIRRQSEYYPFLKENQDRIEKILTFRIPYYIGPLAREKSDFAWMTRKTDDSIRP | |
| | WNFEDLVDKEKSAEAFIHRMTNNDFYLPEEKVLPKHSLIYEKFTVYNELTKVRYKNEQGETYFFDSNIKQEIFDGVFKEHRKVSKKKLLDFLAKEYEEFRIVDVIGLDKENKAFNASLG | |
| | TYHDLEKILDKDFLDNPDNESILEDIVQTLTLFEDREMIKKRLENYKDLFTESQLKKLYRRHYTGWGRLSAKLINGIRDKESQKTILDYLIDDGRSNRNFMQLINDDGLSFKSIISKAQ | |
| | AGSHSDNLKEVVGELAGSPAIKKGILQSLKIVDELVKVMGYEPEQIVVEMARENQTTNQGRRNSRQRYKLLDDGVKNLASDLNGNILKEYPTDNQALQNERLFLYYLQNGRDMYTGEAL | |
| | DIDNLSQYDIDHIIPQAFIKDDSIDNRVLVSSAKNRGKSDDVPSLEIVKDCKVFWKKLLDAKLMSQRKYDNLTKAERGGLTSDDKARFIQRQLVETRQITKHVASILDERFNNELDSKG | |
| | RRIRKVKIVTLKSNLVSNFRKEFGFYKIREVNNYHHAHDAYLNAVVAKAILTKYPQLEPEFVYGDYPKYNSYKTRKSATEKLFFYSNIMNFFKTKVTLADGTVVVKDDIEVNNDTGEIV | |
| | WDKKKHFATVRKVLSYPQNNIVKKTEIQTGGFSKESILAHGNSDKLIPRKTKDIYLDPKKYGGFDSPIVAYSVLVVADIKKGKAQKLKTVTELLGITIMERSRFEKNPSAFLESKGYLN | |
| | IRADKLIILPKYSLFELENGRRRLLASAGELQKGNELALPTQFMKFLYLASRYNESKGKPEEIEKKQEFVNQHVSYFDDILQLINDFSKRVILADANLEKINKLYQDNKENISVDELAN | |
| | NIINLFTFTSLGAPAAFKFFDKIVDRKRYTSTKEVLNSTLIHQSITGLYETRIDLGKLGED | |
| 313 | MNKPYSIGLDIGTNSVGWSIITDDYKVPAKKMRVLGNTDKEYIKKNLIGALLFDGGNTAADRRLKRTARRRYTRRRNRILYLQEIFAEEMSKVDDSFFHRLEDSFLVEEDKRGSKYPIF | WP_050881965.1 |
| | ATLQEEKDYHEKFSTIYHLRKELADKKEKADLRLIYIALAHIIKFRGHFLIEDDSFDVRNTDISKQYQDFLEIFNTTFENNDLLSQNVDVEAILTDKISKSAKKDRILAQYPNQKSTGI | [Streptococcus |
| | FAEFLKLIVGNQADFKKYFNLEDKTPLQFAKDSYDEDLENLLGQIGDEFADLFSAAKKLYDSVLLSGILTVIDLSTKAPLSASMIQRYDEHREDLKQLKQFVKASLPEKYQEIFADSSK | agalactiae] |
| | DGYAGYIEGKTNQEAFYKYLSKLLTKQEDSENFLEKIKNEDFLRKQRTFDNGSIPHQVHLTELKAIIRRQSEYYPFLKENQDRIEKILTFRIPYYIGPLAREKSDFAWMTRKTDDSIRP | |
| | WNFEDLVDKEKSAEAFIHRMTNNDFYLPEEKVLPKHSLIYEKFTVYNELTKVRYKNEQGETYFFDSNIKQEIFDGVFKEHRKVSKKKLLDFLAKEYEEFRIVDVIGLDKENKAFNASLG | |
| | TYHDLEKILDKDFLDNPDNESILEDIVQTLTLFEDREMIKKRLENYKDLFTESQLKKLYRRHYTGWGRLSAKLINGIRDKESQKTILDYLIDDGRSNRNFMQLINDDGLSFKSIISKAQ | |
| | AGSHSDNLKEVVGELAGSPAIKKGILQSLKIVDELVKVMGYEPEQIVVEMARENQTTNQGRRNSRQRYKLLDDGVKNLASDLNGNILKEYPTDNQALQNERLFLYYLQNGRDMYTGEAL | |
| | DIDNLSQYDIDHIIPQAFIKDDSIDNRVLVSSAKNRGKSDDVPSLEIVKDCKVFWKKLLDAKLMSQRKYDNLTKAERGGLTSDDKARFIQRQLVETRQITKHVARILDERFNNELDSKG | |
| | RRIRKVKIVTLKSNLVSNFRKEFGFYKIREVNNYHHAHDAYLNAVVAKAILTKYPQLEPEFVYGDYPKYNSYKTRKSATEKLFFYSNIMNFFKTKVTLADGTVVVKDDIEVNNDTGEIV | |
| | WDKKKHFATVRKVLSYPQNNIVKKTEIQTGGFSKESILAHGNSDKLIPRKTKDIYLDPKKYGGFDSPIVAYSVLVVADIKKGKAQKLKTVTELLGITIMERSRFEKNLSAFLESKGYLN | |
| | IRADKLIILPKYSLFELENGRRRLLASAGELQKGNELALPTQFMKFLYLASRYNESKGKPEEIEKKQEFVNQHVSYFDDILQLINDFSKRVILADANLEKINKLYQDNKENISVDELAN | |
| | NIINLFTFTSLGAPAAFKFFDKIIDRKRYTSTKEVLNSTLIHQSITGLYETRIDLGKLGED | |
| 314 | MNKPYSIGLDIGTNSVGWSIITDDYKVPAKKMRVLGNTDKEYIKKNLIGALLFDGGNTAADRRLKRTARRRYTRRRNRILYLQEIFAEEMSKVDDSFFHRLEDSFLVEEDKRGSKYPIF | WP_030886063.1 |
| | ATLQEEKDYHEKFSTIYHLRKELADKKEKADLRLIYIALAHIIKFRGHFLIEDDSFDVRNTDISKQYQDFLEIFNTTFENNDLLSQNVDVEAILTDKISKSAKKDRILAQYPNQKSTGI | [Streptococcus |
| | FAEFLKLIVGNQADFKKYFNLEDKTPLQFAKDSYDEDLENLLGQIGDEFADLFSAAKKLYDSVLLSGILTVIDLSTKAPLSASMIQRYDEHREDLKQLKQFVKASLPEKYQEIFADSSK | agalactiae] |
| | DGYAGYIEGKTNQEAFYKYLSKLLTKQEDSENFLEKIKNEDFLRKQRTFDNGSIPHQVHLTELKDIIRRQSEYYPFLKENQDRIEKILTFRIPYYIGPLAREKSDFAWMTRKTDDSIRP | |
| | WNFEDLVDKEKSAEAFIHRMTNNDFYLPEEKVLPKHSLIYEKFTVYNELTKVRYKNEQGETYFFDSNIKQEIFDGVFKEHRKVSKKKLLDFLAKEYEEFRIVDVIGLDKENKAFNASLG | |
| | TYHDLEKILDKDFLDNPDNESILEDIVQTLTLFEDREMIKKRLENYKDLFTESQLKKLYRRHYTGWGRLSAKLINGIRDKESQKTILDYLIDDGRSNRNFMQLINDDGLSFKSIISKAQ | |
| | AGSHSDNLKEVVGELAGSPAIKKGILQSLKIVDELVKVMGYEPEQIVVEMARENQTTNQGRRNSRQRYKLLDDGVKNLASDLNGNILKEYPTDNQALQNERLFLYYLQNGRDMYTGEAL | |
| | DIDNLSQYDIDHIIPQAFIKDDSIDNRVLVSSAKNRGKSDDVPSLEIVKDCKVFWKKLLDAKLMSQRKYDNLTKAERGGLTSDDKARFIQRQLVETRQITKHVARILDERFNNELDSKG | |
| | RRIRKVKIVTLKSNLVSNFRKEFGFYKIREVNNYHHAHDAYLNAVVAKAILTKYPQLEPEFVYGDYPKYNSYKTRKSATEKLFFYSNIMNFFKTKVTLADGTVVVKDDIEVNNDTGEIV | |
| | WDKKKHFATVRKVLSYPQNNIVKKTEIQTGGFSKESILAHGNSDKLIPRKTKDIYLDPKKYGGFDSPIVAYSVLVVADIKKGKAQKLKTVTELLGITIMERSRFEKNPSAFLESKGYLN | |
| | IRADKLIILPKYSLFELENGRRRLLASAGELQKGNELALPTQFMKFLYLASRYNESKGKPEEIEKKQEFVNQHVSYFDDILQLINDFSKRVILADANLEKINKLYQDNKENISVDELAN | |
| | NIINLFTFTSLGAPAAFKFFDKIVDRKRYTSTKEVLNSTLIHQSITGLYETRIDLGKLGED | |
| 315 | MNKPYSIGLDIGTNSVGWSIITDDYKVPAKKMRVLGNTDKEYIKKNLIGALLFDGGNTAADRRLKRTARRRYTRRRNRILYLQEIFAEEMSKVDDSFFHRLEDSFLVEEDKRGSKYPIF | WP_001040092.1 |
| | ATMQEEKDYHEKFPTIYHLRKELADKKEKADLRLVYLALAHIIKFRGHFLIEDDRFDVRNTDIQKQYQAFLEIFDTSFENNHLLSQNVDVEAILTDKISKSAKKDRILAQYPNQKSTGI | [Streptococcus |
| | FAEFLKLIVGNQADFKKHFNLEDKTPLQFAKDSYDEDLENLLGQIGDEFADLFSAAKKLYDSVLLSGILTVTDLSTKAPLSAYMIQRYDEHREDLKQLKQFVKASLPEKYQEIFADSSK | agalactiae] |
| | DGYAGYIEGKTNQEAFYKYLSKLLTKQEDSEYFLEKIKNEDFLRKQRTFDNGSIPHQVHLTELKAIIRRQSEYYPFLKENQDKIEKILTFRIPYYVGPLARGNSDFAWMTRKTDDSIRP | |
| | WNFEDLVDKEKSAEAFIHRMTNNDLYLPEEKVLPKHSLIYEKFTVYNELTKVRYKNEQGETYFFDSNVKQEIFDGVFKEHRKVSKKQLLDFLAKEFEEFRIVDVTGLDKENKAFNASLG | |
| | TYHDLKKILDKDFLDNPDNESILEDIVQTITLFEDREMIKKRLENYKDLFTESQLKKLYRRHYTGWGRLSAKLINGIRDRESQKTILDYLISDGRANRNFMQLINDDGLSFKSIISKAQ | |
| | SGSHSDNLKEVVGELAGSPAIKKGILQSLKIVDELVKVMGYEPEQIVVEMARENQTTNQGRRNSRQRYKLLEDGVKNLASDLNGDILKEYPTDNQALQNERLFLYYLQNGRDMYTGEAL | |
| | DIDNLSQYDIDHIVPQAFIKDDSIDNRVLVSSAKNRGKSDDVPSIDIVKARKAFWKKLLDAKLISQRKYDNLTKAERGGLTPDDKAGFIQRQLVETRQITKHVARILDERFNNKVDDNN | |
| | KPIRKVKIVTLKSNLVSNFRKEFGFYKIREVNNYHHAHDAYLNAVVAKAILTKYPQLEPEFVYGDYPKYNSYKTRKSATEKLFFYSNIMNFFKTKVTLADETVVVKDDIEVNNETGEIA | |
| | WDKKKHFATVRKVLSYPQVNIVKKTEVQTGGFSKESILAHSNSDKLIPRKTKDIYLDPKKYGGFDSPIVAYSVLVLADIKKGKAQKLKTVKELIGITIMERERFEKNPSAFLESKGYLN | |
| | IRTDKLIILPKYSLFELENGRRRLLASAGELQKGNELALPTQYMKFLYLASRYNESKGKPEEIEKKQEFVNQHISYFDDILQLINDFSKRVILADANLEKINKLYSDNKDNTPVDELAK | |
| | NIINLFTFTSLGAPAAFKFFDKSVDRKRYTSTKEVLDSTLIHQSITGLYETRIDLGKLGED | |
| 316 | MNKPYSIGLDIGTNSVGWSIITDDYKVPAKKMRVLGNTDKEYIKKNLIGALLFDGGNTAADRRLKRTARRRYTRRRNRILYLQEIFAEEMSKVDDSFFHRLEDSFLVEEDKRGSKYPIF | WP_015058523.1 |
| | ATMQEEKDYHEKFPTIYHLRKELADKKEKADLRLVYLALAHIIKFRGHFLIEDDRFDVRNTDIQKQYQAFLEIFDTSFENNHLLSQNVDVEAILTDKISKSAKKDRILAQYPNQKSTGI | [Streptococcus |
| | FAEFLKLIVGNQADFKKHFNLEDKTPLQFAKDSYDEDLENLLGQIGDEFADLFSAAKKLYDSVLLSGILTVTDLSTKAPLSASMIQRYDEHREDLKQLKQFVKASLPEKYQEIFADSSK | agalactiae] |
| | DGYAGYIEGKTNQEAFYKYLSKLLTKQEDSEYFLEKIKNEDFLRKQRTFDNGSIPHQVHLTELKAIIRRQSEYYPFLKENQDKIEKILTFRIPYYVGPLARGNSDFAWMTRKTDDSIRP | |
| | WNFEDLVDKEKSAEAFIHRMTNNDLYLPEEKVLPKHSLIYEKFTVYNELTKVRYKNEQGETYFFDSNVKQEIFDGVFKEHRKVSKKQLLDFLAKEFEEFRIVDVTGLDKENKAFNASLG | |
| | TYHDLKKILDKDFLDNPDNESILEDIVQTITLFEDREMIKKRLENYKDLFTESQLKKLYRRHYTGWGRLSAKLINGIRDRESQKTILDYLISDGRANRNFMQLINDDGLSFKSIISKAQ | |
| | SGSHSDNLKEVVGELAGSPAIKKGILQSLKIVDELVKVMGYEPEQIVVEMARENQTTNQGRRNSRQRYKLLEDGVKNLASDLNGDILKEYPTDNQALQNERLFLYYLQNGRDMYTGEAL | |
| | DIDNLSQYDIDHIVPQAFIKDDSIDNRVLVSSAKNRGKSDDVPSIDIVKARKAFWKKLLDAKLISQRKYDNLTKAERGGLTPDDKAGFIQRQLVETRQITKHVARILDERFNNKVDDNN | |
| | KPIRKVKIVTLKSNLVSNFRKEFGFYKIREVNNYHHAHDAYLNAVVAKAILTKYPQLEPEFVYGDYPKYNSYKTRKSATEKLFFYSNIMNFFKTKVTLADETVVVKDDIEVNNETGEIA | |
| | WDKKKHFATVRKVLSYPQVNIVKKTEVQTGGFSKESILAHSNSDKLIPRKTKDIYLDPKKYGGFDSPIVAYSVLVLADIKKGKAQKLKTVKELIGITIMERERFEKNPSAFLESKGYLN | |
| | IRTDKLIILPKYSLFELENGRRRLLASAGELQKGNELALPTQYMKFLYLASRYNESKGKPEEIEKKQEFVNQHVSYFDDILQLINDFSKRVILADANLEKINKLYSDNKDNTPVDELAK | |
| | NIINLFTFTSLGAPAAFKFFDKSVDRKRYTSTKEVLDSTLIHQSITGLYETRIDLGKLGED | |
| 317 | MNKPYSIGLDIGTNSVGWSIITDDYKVPAKKMRVLGNTDKEYIKKNLIGALLFDGGNTAADRRLKRTARRRYTRRRNRILYLQEIFAEEMSKVDDSFFHRLEDSFLVEEDKRGSKYPIF | WP 001040094.1 |
| | ATMQEEKYYHEKFPTIYHLRKELADKKEKADLRLIYLALAHIIKFRGHFLIEDDRFDVRNTDIQKQYQAFLEIFDTTFENNDLLSQNVDVEAILTDKISKSAKKDRILARYPNQKSTGI | +Streptococcus |
| | FAEFLKLIVGNQADFKKHFNLEDKTPLQFAKDSYDEDLENLLGQIGDEFADLFSAAKKLYDSVLLSGILTVTDLSTKAPLSASMIQHYDEHREDLKQLKQFVKASLPEKYQEIFADSSK | agalactiae] |
| | DGYAGYIEGKTNQEAFYKYLSKLLTKQEGSEYLLEKIKNEDFLRKQRTFDNGSIPHQVHLTELRAIIRRQSEYYPFLKENLDRIEKILTFRIPYYVGPLAREKSDFAWMTRKTDDSIRP | |
| | WNFEDLVDKEKSAEAFIHRMTNNDLYLPEEKVLPKHSLIYEKFTVYNELTKVRFLAEGFKDFQFLNRKQKETIFNSLFKEKRKVTEKDIISFLNKVDGYEGIAIKGIEKQFNASLSTYH | |
| | DLKKILGKDFLDNTDNELILEDIVQTLTLFEDREMIRKRLDIYKDFFTESQLKKLYRRHYTGWGRLSAKLINGIRNKENQKTILDYLIDDGSANRNFMQLIKDAGLSFKPIIDKARTGS | |
| | HSDNLKEVVGELAGSPAIKKGILQSLKIVDELVKVMGYEPEQIVVEMARENQTTAKGLSRSRQRLTTLRESLANLKSNILEEKKPKYVKDQVENHHLSDDRLFLYYLQNGKDMYTDDEL | |
| | DIDNLSQYDIDHIIPQAFIKDDSIDNRVLVSSAKNRGKSDDVPSVEIVKDCKVFWKKLLDAKLMSQRKYDNLTKAERGGLTSDDKARFIQRQLVETRQITKHVARILDERFNNELDSKG | |
| | RRIRKVKIVTLKSNLVSNFRKEFGFYKIREVNNYHHAHDAYLNAVVAKAILTKYPQLEPEFVYGDYPKYNSYKTRKSATEKLFFYSNIMNFFKTKVTLADGTVVVKDDIEVNNDTGEIV | |
| | WDKKKHFATVRKVLSYPQVNIVKKTEIQTGGFSKESILAHGNSDKLIPRKTKDIYLDPKKYGGFDSPIVAYSVLVVADIKKGKAQKLKTVTELLGITIMERSRFEKNPSAFLESKGYLN | |
| | IRDDKLMILPKYSLFELENGRRRLLASAGELQKGNELALPTQFMKFLYLASRYNELKGKPEEIEQKQEFVVQHVSYFDDILQIINDFSNRVILADANLEKINKLYQDNKENIPVDELAN | |
| | NIINLFTFTSLGAPAAFKFFDKIVDRKRYTSTKEVLNSTLIHQSITGLYETRIDLGKLGED | |
| 318 | MNKPYSIGLDIGTNSVGWSIITDDYKVPAKKMRVLGNTDKEYIKKNLIGALLFDGGNTAADRRLKRTARRRYTRRRNRILYLQEIFAEEMSKVDDSFFHRLEDSFLVEEDKRGSKYPIF | WP_001040095.1 |
| | ATMQEEKYYHEKFPTIYHLRKELADKKEKADLRLIYLALAHIIKFRGHFLIEDDRFDVRNTDIQKQYQAFLEIFDTTFENNDLLSQNVDVEAILTDKISKSAKKDRILARYPNQKSTGI | [Streptococcus |
| | FAEFLKLIVGNQADFKKHFNLEDKTPLQFAKDSYDEDLENLLGQIGDEFADLFSAAKKLYDSVLLSGILTVTDLSTKAPLSASMIQRYDEHREDLKQLKQFVKASLPEKYQEIFADSSK | agalactiae] |
| | DGYAGYIEGKTNQEAFYKYLSKLLTKQEGSEYLLEKIKNEDFLRKQRTFDNGSIPHQVHLTELRAIIRRQSEYYPFLKENLDRIEKILTFRIPYYVGPLAREKSDFAWMTRKTDDSIRP | |
| | WNFEDLVDKEKSAEAFIHRMTNNDLYLPEEKVLPKHSLIYEKFTVYNELTKVRFLAEGFKDFQFLNRKQKETIFNSLFKEKRKVTEKDIISFLNKVDGYEGIAIKGIEKQFNASLSTYH | |
| | DLKKILGKDFLDNTDNELILEDIVQTLTLFEDREMIRKRLDIYKDFFTESQLKKLYRRHYTGWERLSAKLINGIRNKENQKTILDYLIDDGSANRNFMQLIKDAGLSFKPIIDKARTGS | |
| | HLDNLKEVVGELAGSPAIKKGILQSLKIVDELVKVMGYEPEQIVVEMARENQTTAKGLSRSRQRLTTLRESLANLKSNILEEKKPKYVKDQVENHHLSDDRLFLYYLQNGKDMYTDDEL | |
| | DIDNLSQYDIDHIIPQAFIKDDSIDNRVLVSSAKNRGKSDDVPSLEIVKDCKVFWKKLLDAKLMSQRKYDNLTKAERGGLTSDDKARFIQRQLVETRQITKHVARILDERFNNELDSKG | |
| | RRIRKVKIVTLKSNLVSNFRKEFGFYKIREVNNYHHAHDAYLNAVVAKAILTKYPQLEPEFVYGDYPKYNSYKTRKSATEKLFFYSNIMNFFKTKVTLADGTVVVKDDIEVNNDTGEIV | |
| | WDKKKHFATVRKVLSYPQVNIVKKTEVQTGGFSKESILAHGNSDKLIPRKTKDIYLDPKKYGGFDSPIVAYSVLVVADIKKGKAQKLKTVTELLGITIMERSRFEKNPSAFLESKGYLN | |
| | IRTDKLIILPKYSLFELENGRRRLLASAGELQKGNELALPTQYMKFLYLASRYNELKGKPEEIEQKQEFVVQHVSYFDDILQIINDFSNRVILADANLEKINKLYQDNKENIPVDELAN | |
| | NIINLFTFTSLGAPAAFKFFDKIVDRKRYTSTKEVLNSTLIHQSITGLYETRIDLGKLGEG | |
| 319 | MNKPYSIGLDIGTNSVGWSIITDDYKVPAKKMRVLGNTDKEYIKKNLIGALLFDGGNTAADRRLKRTARRRYTRRRNRILYLQEIFAEEMSKVDDSFFHRLEDSFLVEEDKRGSKYPIF | WP_001040096.1 |
| | ATMQEEKYYHEKFPTIYHLRKELADKKEKADLRLIYLALAHIIKFRGHFLIEDDRFDVRNTDIQKQYQAFLEIFDTTFENNDLLSQNVDVEAILTDKISKSAKKDRILARYPNQKSTGI | [Streptococcus |
| | FAEFLKLIVGNQADFKKHFNLEDKTPLQFAKDSYDEDLENLLGQIGDEFADLFSAAKKLYDSVLLSGILTVTDLSTKAPLSASMIQRYDEHREDLKQLKQFVKASLPEKYQEIFADSSK | agalactiae] |
| | DGYAGYIEGKTNQEAFYKYLSKLLTKQEGSEYLLEKIKNEDFLRKQRTFDNGSIPHQVHLTELRAIIRRQSEYYPFLKENLDRIEKILTFRIPYYVGPLAREKSDFAWMTRKTDDSIRP | |
| | WNFEDLVDKEKSAEAFIHRMTNNDLYLPEEKVLPKHSLIYEKFTVYNELTKVRFLAEGFKDFQFLNRKQKETIFNSLFKEKRKVTEKDIISFLNKVDGYEGIAIKGIEKQFNASLSTYH | |
| | DLKKILGKDFLDNTDNELILEDIVQTLTLFEDREMIRKRLDIYKDFFTESQLKKLYRRHYTGWGRLSAKLINGIRNKENQKTILDYLIDDGSANRNFMQLIKDAGLSFKPIIDKARTGS | |
| | HLDNLKEVVGELAGSPAIKKGILQSLKIVDELVKVMGYEPEQIVVEMARENQTTAKGLSRSRQRLTTLRESLANLKSNILEEKKPKYVKDQVENHHLSDDRLFLYYLQNGKDMYTDDEL | |
| | DIDNLSQYDIDHIIPQAFIKDDSIDNRVLVSSAKNRGKSDDVPSLEIVKDCKVFWKKLLDAKLMSQRKYDNLTKAERGGLTSDDKARFIQRQLVETRQITKHVARILDERFNNELDSKG | |
| | RRIRKVKIVTLKSNLVSNFRKEFGFYKIREVNNYHHAHDAYLNAVVAKAILTKYPQLEPEFVYGDYPKYNSYKTRKSATEKLFFYSNIMNFFKTKVTLADGTVVVKDDIEVNNDTGEIV | |
| | WDKKKHFATVRKVLSYPQVNIVKKTEVQTGGFSKESILAHGNSDKLIPRKTKDIYLDPKKYGGFDSPIVAYSVLVVADIKKGKAQKLKTVTELLGITIMERSRFEKNPSAFLESKGYLN | |
| | IRTDKLIILPKYSLFELENGRRRLLASAGELQKGNELALPTQYMKFLYLASRYNELKGKPEEIEQKQEFVVQHVSYFDDILQIINDFSNRVILADANLEKINKLYQDNKENIPVDELAN | |
| | NIINLFTFTSLGAPAAFKFFDKIVDRKRYTSTKEVLNSTLIHQSITGLYETRIDLGKLGEG | |
| 320 | MNKPYSIGLDIGTNSVGWSIITDDYKVPAKKMRVLGNTDKEYIKKNLIGALLFDGGNTAADRRLKRTARRRYTRRRNRILYLQEIFAEEMSKVDDSFFHRLEDSFLVEEDKRGSKYPIF | WP_001040097.1 |
| | ATMQEEKYYHEKFPTIYHLRKELADKKEKADLRLIYLALAHIIKFRGHFLIEDDRFDVRNTDIQKQYQAFLEIFDTTFENNDLLSQNVDVEAILTDKISKSAKKDRILARYPNQKSTGI | [Streptococcus |
| | FAEFLKLIVGNQADFKKHFNLEDKTPLQFAKDSYDEDLENLLGQIGDEFADLFSAAKKLYDSVLLSGILTVTDLSTKAPLSASMIQRYDEHREDLKQLKQFVKASLPEKYQEIFADSSK | agalactiae] |
| | DGYAGYIEGKTNQEAFYKYLSKLLTKQEGSEYLLEKIKNEDFLRKQRTFDNGSIPHQVHLTELRAIIRRQSEYYPFLKENLDRIEKILTFRIPYYVGPLAREKSDFAWMTRKTDDSIRP | |
| | WNFEDLVDKEKSAEAFIHRMTNNDLYLPEEKVLPKHSLIYEKFTVYNELTKVRFLAEGFKDFQFLNRKQKETIFNSLFKEKRKVTEKDIISFLNKVDGYEGIAIKGIEKQFNASLSTYH | |
| | DLKKILGKDFLDNTDNELILEDIVQTLTLFEDREMIRKRLDIYKDFFTESQLKKLYRRHYTGWGRLSAKLINGIRNKENQKTILDYLIDDGSANRNFMQLIKDAGLSFKPIIDKARTGS | |
| | HSDNLKEVVGELAGSPAIKKGILQSLKIVDELVKVMGYEPEQIVVEMARENQTTAKGLSRLRQRLTTLRESLANLKSNILEEKKPKYVKDQVENHHLSDDRLFLYYLQNGKDMYTDDEL | |
| | DIDNLSQYDIDHIIPQAFIKDDSIDNRVLVSSAKNRGKSDDVPSVEIVKDCKVFWKKLLDAKLMSQRKYDNLTKAERGGLTSDDKARFIQRQLVETRQITKHVARILDERFNNELDSKG | |
| | RRIRKVKIVTLKSNLVSNFRKEFGFYKIREVNNYHHAHDAYLNAVVAKAILTKYPQLEPEFVYGDYPKYNSYKTRKSATEKLFFYSNIMNFFKTKVTLADGTVVVKDDIEVNNDTGEIV | |
| | WDKKKHFATVRKVLSYPQVNIVKKTEIQTGGFSKESILAHGNSDKLIPRKTKDIYLDPKKYGGFDSPIVAYSVLVVADIKKGKAQKLKTVTELLGITIMERSRFEKNPSAFLESKGYLN | |
| | IRDDKLMILPKYSLFELENGRRRLLASADELQKGNELALPTQFMKFLYLASRYNELKGKPEEIEQKQEFVVQHVSYFDDILQIINDFSNRVILADANLEKINKLYQDNKENIPVDELAN | |
| | NIINLFTFTSLGAPAAFKFFDKIVDRKRYTSTKEVLNSTLIHQSITGLYETRIDLGKLGED | |
| 321 | MNKPYSIGLDIGTNSVGWSIITDDYKVPAKKMRVLGNTDKEYIKKNLIGALLFDGGNTAADRRLKRTARRRYTRRRNRILYLQEIFAEEMSKVDDSFFHRLEDSFLVEEDKRGSKYPIF | WP_001040098.1 |
| | ATMQEEKYYHEKFPTIYHLRKELADKKEKADLRLIYLALAHIIKFRGHFLIEDDRFDVRNTDIQKQYQAFLEIFDTTFENNDLLSQNVDVEAILTDKISKSAKKDRILARYPNQKSTGI | [Streptococcus |
| | FAEFLKLIVGNQADFKKHFNLEDKTPLQFAKDSYDEDLENLLGQIGDEFADLFSAAKKLYDSVLLSGILTVTDLSTKAPLSASMIQRYDEHREDLKQLKQFVKASLPEKYQEIFADSSK | agalactiae] |
| | DGYAGYIEGKTNQEAFYKYLSKLLTKQEGSEYLLEKIKNEDFLRKQRTFDNGSIPHQVHLTELRAIIRRQSEYYPFLKENLDRIEKILTFRIPYYVGPLAREKSDFAWMTRKTDDSIRP | |
| | WNFEDLVDKEKSAEAFIHRMTNNDLYLPEEKVLPKHSLIYEKFTVYNELTKVRFLAEGFKDFQFLNRKQKETIFNSLFKEKRKVTEKDIISFLNKVDGYEGIAIKGIEKQFNASLSTYH | |
| | DLKKILGKDFLDNTDNELILEDIVQTLTLFEDREMIRKRLDIYKDFFTESQLKKLYRRHYTGWGRLSAKLINGIRNKENQKTILDYLIDDGSANRNFMQLIKDAGLSFKPIIDKARTGS | |
| | HSDNLKEVVGELAGSPAIKKGILQSLKIVDELVKVMGYEPEQIVVEMARENQTTAKGLSRSRQRLTTLRESLANLKSNILEEKKPKYVKDQVENHHLSDDRLFLYYLQNGKDMYTDDEL | |
| | DIDNLSQYDIDHIIPQAFIKDDSIDNRVLVSSAKNRGKSDDVPSVEIVKDCKVFWKKLLDAKLMSQRKYDNLTKAERGGLTSDDKARFIQRQLVETRQITKHVARILDERFNNELDSKG | |
| | RRIRKVKIVTLKSNLVSNFRKEFGFYKIREVNNYHHAHDAYLNAVVAKAILTKYPQLEPEFVYGDYPKYNSYKTRKSATEKLFFYSNIMNFFKTKVTLADGTVVVKDDIEVNNDTGEIV | |
| | WDKKKHFATVRKVLSYPQVNIVKKTEIQTGGFSKESILAHGNSDKLIPRKTKDIYLDPKKYGGFDSPIVAYSVLVVADIKKGKAQKLKTVTELLGITIMERSRFEKNPSAFLESKGYLN | |
| | IRDDKLMILPKYSLFELENGRRRLLASAGELQKGNELALPTQFMKFLYLASRYNELKGKPEEIEQKQEFVVQHVSYFDDILQIINDFSNRVILADANLEKINKLYQDNKENIPVDELAN | |
| | NIINLFTFTSLGAPAAFKFFDKIVDRKRYTSTKEVLNSTLIHQSITGLYETRIDLGKLGED | |
| 322 | MNKPYSIGLDIGTNSVGWSIITDDYKVPAKKMRVLGNTDKEYIKKNLIGALLFDGGNTAADRRLKRTARRRYTRRRNRILYLQEIFAEEMSKVDDSFFHRLEDSFLVEEDKRGSKYPIF | WP_001040099.1 |
| | ATMQEEKYYHEKFPTIYHLRKELADKKEKADLRLIYLALAHIIKFRGHFLIEDDRFDVRNTDIQKQYQAFLEIFDTTFENNDLLSQNVDVEAILTDKISKSAKKDRILARYPNQKSTGI | [Streptococcus |
| | FAEFLKLIVGNQADFKKHFNLEDKTPLQFAKDSYDEDLENLLGQIGDEFADLFSAAKKLYDSVLLSGILTVTDLSTKAPLSASMIQRYDEHREDLKQLKQFVKASLPEKYQEIFADSSK | agalactiae] |
| | DGYAGYIEGKTNQEAFYKYLSKLLTKQEGSEYLLEKIKNEDFLRKQRTFDNGSIPHQVHLTELRAIIRRQSEYYPFLKENLDRIEKILTFRIPYYVGPLAREKSDFAWMTRKTDDSIRP | |
| | WNFEDLVDKEKSAEAFIHRMTNNDLYLPEEKVLPKHSLIYEKFTVYNELTKVRFLAEGFKDFQFLNRKQKETIFNSLFKEKRKVTEKDIISFLNKVDGYEGIAIKGIEKQFNASLSTYH | |
| | DLKKILGKDFLDNTDNELILEDIVQTLTLFEDREMIRKRLDIYKDFFTESQLKKLYRRHYTGWGRLSAKLINGIRNKENQKTILDYLIDDGSANRNFMQLIKDAGLSFKPIIDKARTGS | |
| | HSDNLKEVVGELAGSPAIKKGILQSLKIVDELVKVMGYEPEQIVVEMARENQTTAKGLSRSRQRLTTLRESLANLKSNILEEKKPKYVKDQVENHHLSDDRLFLYYLQNGKDMYTDDEL | |
| | DIDNLSQYDIDHIIPQAFIKDDSIDNRVLVSSAKNRGKSDDVPSVEIVKDCKVFWKKLLDAKLMSQRKYDNLTKAERGGLTSDDKARFIQRQLVETRQITKHVARILDERFNNELDSKG | |
| | RRIRKVKIVTLKSNLVSNFRKEFGFYKIREVNNYHHAHDAYLNAVVAKAILTKYPQLEPEFVYGDYPKYNSYKTRKSATEKLFFYSNIMNFFKTKVTLADGTVVVKDDIEVNNDTGEIV | |
| | WDKKKHFATVRKVLSYPQVNIVKKTEIQTGGFSKESILAHGNSDKLIPRKTKDIYLDPKKYGGFDSPKVAYSVLVVADIKKGKAQKLKTVTELLGITIMERSRFEKNPSAFLESKGYLN | |
| | IRDDKLMILPKYSLFELENGRRRLLASAGELQKGNELALPTQFMKFLYLASRYNELKGKPEEIEQKQEFVVQHVSYFDDILQIINDFSNRVILADANLEKINKLYQDNKENIPVDELAN | |
| | NIINLFTFTSLGAPAAFKFFDKIVDRKRYTSTKEVLNSTLIHKSITGLYETRIDLGKLGED | |
| 323 | MNKPYSIGLDIGTNSVGWSIITDDYKVPAKKMRVLGNTDKEYIKKNLIGALLFDGGNTAADRRLKRTARRRYTRRRNRILYLQEIFAEEMSKVDDSFFHRLEDSFLVEEDKRGSKYPIF | WP_001040100.1 |
| | ATMQEEKYYHEKFPTIYHLRKELADKKEKADLRLIYLALAHIIKFRGHFLIEDDRFDVRNTDIQKQYQAFLEIFDTTFENNDLLSQNVDVEAILTDKISKSAKKDRILARYPNQKSTGI | [Streptococcus |
| | FAEFLKLIVGNQADFKKHFNLEDKTPLQFAKDSYDEDLENLLGQIGDEFADLFSAAKKLYDSVLLSGILTVTDLSTKAPLSASMIQRYDEHREDLKQLKQFVKASLPEKYQEIFADSSK | agalactiae] |
| | DGYAGYIEGKTNQEAFYKYLSKLLTKQEGSEYLLEKIKNEDFLRKQRTFDNGSIPHQVHLTELRAIIRRQSEYYPLLKENLDRIEKILTFRIPYYVGPLAREKSDFAWMTRKTDDSIRP | |
| | WNFEDLVDKEKSAEAFIHRMTNNDLYLPEEKVLPKHSLIYEKFTVYNELTKVRFLAEGFKDFQFLNRKQKETIFNSLFKEKRKVTEKDIISFLNKVDGYEGIAIKGIEKQFNASLSTYH | |
| | DLKKILGKDFLDNTDNELILEDIVQTLTLFEDREMIRKRLDIYKDFFTESQLKKLYRRHYTGWGRLSAKLINGIRNKENQKTILDYLIDDGSANRNFMQLIKDAGLSFKPIIDKARTGS | |
| | HSDNLKEVVGELAGSPAIKKGILQSLKIVDELVKVMGYEPEQIVVEMARENQTTAKGLSRSRQRLTTLRESLANLKSNILEEKKPKYVKDQVENHHLSDDRLFLYYLQNGKDMYTDDEL | |
| | DIDNLSQYDIDHIIPQAFIKDDSIDNRVLVSSAKNRGKSDDVPSVEIVKDCKVFWKKLLDAKLMSQRKYDNLTKAERGGLTSDDKARFIQRQLVETRQITKHVARILDERFNNELDSKG | |
| | RRIRKVKIVTLKSNLVSNFRKEFGFYKIREVNNYHHAHDAYLNAVVAKAILTKYPQLEPEFVYGDYPKYNSYKTRKSATEKLFFYSNIMNFFKTKVTLADGTVVVKDDIEVNNDTGEIV | |
| | WDKKKHFATVRKVLSYPQVNIVKKTEIQTGGFSKESILAHGNSDKLIPRKTKDIYLDPKKYGGFDSPIVAYSVLVVADIKKGKAQKLKTVTELLGITIMERSRFEKNPSAFLESKGYLD | |
| | IRDDKLMILPKYSLFELENGRRRLLASAGELQKGNELALPTQFMKFLYLASRYNELKGKPEEIEQKQEFVVQHVSYFDDILQIINDFSNRVILADANLEKINKLYQDNKENIPVDELAN | |
| | NIINLFTFTSLGAPAAFKFFDKIVDRKRYTSTKEVLNSTLIHQSITGLYETRIDLGKLGED | |
| 324 | MNKPYSIGLDIGTNSVGWSIITDDYKVPAKKMRVLGNTDKEYIKKNLIGALLFDGGNTAADRRLKRTARRRYTRRRNRILYLQEIFAEEMSKVDDSFFHRLEDSFLVEEDKRGSKYPIF | WP_017643650.1 |
| | ATMQEEKYYHEKFPTIYHLRKELADKKEKADLRLIYLALAHIIKFRGHFLIEDDRFDVRNTDIQKQYQAFLEIFDTTFENNDLLSQNVDVEAILTDKISKSAKKDRILARYPNQKSTGI | [Streptococcus |
| | FAEFLKLIVGNQADFKKHFNLEDKTPLQFAKDSYDEDLENLLGQIGDEFADLFSAAKKLYDSVLLSGILTVTDLSTKAPLSASMIQRYDEHREDLKQLKQFVKASLPEKYQEIFADSSK | agalactiae] |
| | DGYAGYIEGKTNQEAFYKYLSKLLTKQEGSEYLLEKIKNEDFLRKQRTFDNGSIPHQVHLTELRAIIRRQSEYYPFLKENLDRIEKILTFRIPYYVGPLAREKSDFAWMTRKTDDSIRP | |
| | WNFEDLVDKEKSAEAFIHRMTNNDLYLPEEKVLPKHSLIYEKFTVYNELTKVRFLAEGFKDFQFLNRKQKETIFNSLFKEKRKVTEKDIISFLNKVDGYEGIAIKGIEKQFNASLSTYH | |
| | DLKKILGKDFLDNTDNELILEDIVQTLTLFEDREMIRKRLDIYKDFFTESQLKKLYRRHYTGWGRLSAKLINGIRNKENQKTILDYLIDDGSANRNFMQLIKDAGLSFKPIIDKARTGS | |
| | HSDNLKEVVGELAGSPAIKKGILQSLKIVDELVKVMGYEPEQIVVEMARENQTTAKGLSRLRQRLTTLRESLANLKSNILEEKKPKYVKDQVENHHLSDDRLFLYYLQNGKDMYTDDEL | |
| | DIDNLSQYDIDLIIPQAFIKDDSIDNRVLVSSAKNRGKSDDVPSVEIVKDCKVFWKKLLDAKLMSQRKYDNLTKAERGGLTSDDKARFIQRQLVETRQITKHVARILDERFNNELDSKG | |
| | RRIRKVKIVTLKSNLVSNFRKEFGFYKIREVNNYHHAHDAYLNAVVAKAILTKYPQLEPEFVYGDYPKYNSYKTRKSATEKLFFYSNIMNFFKTKVTLADGTVVVKDDIEVNNDTGEIV | |
| | WDKKKHFATVRKVLSYPQVNIVKKTEIQTGGFSKESILAHGNSDKLIPRKTKDIYLDPKKYGGFDSPIVAYSVLVVADIKKGKAQKLKTVTELLGITIMERSRFEKNPSAFLESKGYLN | |
| | IRDDKLMILPKYSLFELENGRRRLLASADELQKGNELALPTQFMKFLYLASRYNELKGKPEEIEQKQEFVVQHVSYFDDILQIINDFSNRVILADANLEKINKLYQDNKENIPVDELAN | |
| | NIINLFTFTSLGAPAAFKFFDKIVDRKRYTSTKEVLNSTLIHQSITGLYETRIDLGKLGED | |
| 325 | MNKPYSIGLDIGTNSVGWSIITDDYKVPAKKMRVLGNTDKEYIKKNLIGALLFDGGNTAADRRLKRTARRRYTRRRNRILYLQEIFAEEMSKVDDSFFHRLEDSFLVEEDKRGSKYPIF | WP_047209694.1 |
| | ATMQEEKYYHEKFPTIYHLRKELADKKEKADLRLIYLALAHIIKFRGHFLIEDDSFDVRNTDIQKQYQAFLEIFDTTFENNDLLSQNVDVEAILTDKISKSAKKDRILARYPNQKSTGI | [Streptococcus |
| | FAEFLKLIVGNQADFKKHFNLEDKTPLQFAKDSYDEDLENLLGQIGDEFADLFSAAKKLYDSVLLSGILTVTDLSTKAPLSASMIQRYDEHREDLKQLKQFVKASLPEKYQEIFADSSK | agalactiae] |
| | DGYAGYIEGKTNQEAFYKYLSKLLTKQEGSEYLLEKIKNEDFLRKQRTFDNGSIPHQVHLTELRAIIRRQSEYYPFLKENLDRIEKILTFRIPYYVGPLAREKSDFAWMTRKTDDSIRP | |
| | WNFEDLVDKEKSAEAFIHRMTNNDLYLPEEKVLPKHSLIYEKFTVYNELTKVRFLAEGFKDFQFLNRKQKETIFNSLFKEKRKVTEKDIISFLNKVDGYEGIAIKGIEKQFNASLSTYH | |
| | DLKKILGKDFLDNTDNELILEDIVQTLTLFEDREMIRKRLDIYKDFFTESQLKKLYRRHYTGWGRLSAKLINGIRNKENQKTILDYLIDDGSANRNFMQLIKDAGLSFKPIIDKARTGS | |
| | HSDNLKEVVGELAGSPAIKKGILQSLKIVDELVKVMGYEPEQIVVEMARENQTTAKGLSRSRQRLTTLRESLANLKSNILEEKKPKYVKDQVENHHLSDDRLFLYYLQNGKDMYTDDEL | |
| | DIDNLSQYDIDHIIPQAFIKDDSIDNRVLVSSAKNRGKSDDVPSVEIVKDCKVFWKKLLDAKLMSQRKYDNLTKAERGGLTSDDKARFIQRQLVETRQITKHVARILDERFNNELDSKG | |
| | RRIRKVKIVTLKSNLVSNFRKEFGFYKIREVNNYHHAHDAYLNAVVAKAILTKYPQLEPEFVYGDYPKYNSYKTRKSATEKLFFYSNIMNFFKTKVTLADGTVVVKDDIEVNNDTGEIV | |
| | WDKKKHFATVRKVLSYPQVNIVKKTEIQTGGFSKESILAHGNSDKLIPRKTKDIYLDPKKYGGFDSPIVAYSVLVVADIKKGKAQKLKTVTELLGITIMERSRFEKNPSAFLESKGYLN | |
| | IRDDKLMILPKYSLFELENGRRRLLASAGELQKGNELALPTQFMKFLYLASRYNELKGKPEEIEQKQEFVVQHVSYFDDILQIINDFSNRVILADANLEKINKLYQDNKENIPVDELAN | |
| | NIINLFTFTSLGAPAAFKFFDKIVDRKRYTSTKEVLNSTLIHKSITGLYETRIDLGKLGED | |
| 326 | MNKPYSIGLDIGTNSVGWSIITDDYKVPAKKMRVLGNTDKEYIKKNLIGALLFDGGNTAADRRLKRTARRRYTRRRNRILYLQEIFAEEMSKVDDSFFHRLEDSFLVEEDKRGSKYXIF | WP_001040104.1 |
| | ATLQEEKDYHEKFSTIYHLRKELADKKEKADLRLIYIALAHIIKFRGHFLIEDDSFDVRNTDISKQYQDFLEIFNTTFENNDLLSQNVDVEAILTDKISKSAKKDRILAQYPNQKSTGI | [Streptococcus |
| | FAEFLKLIVGNQADFKKYFNLEDKTPLQFAKDSYDEDLENLLGQIGDEFADLFSAAKKLYDSVLLSGILTVIDLSTKAPLSASMIQRYDEHREDLKQLKQFVKASLPEKYQEIFADSSK | agalactiae] |
| | DGYAGYIEGKTNQEAFYKYLSKLLTKQEDSENFLEKIKNEDFLRKQRTFDNGSIPHQVHLTELKAIIRRQSEYYPFLKENQDRIEKILTFRIPYYIGPLAREKSDFAWMTRKTDDSIRP | |
| | WNFEDLVDKEKSAEAFIHRMTNNDFYLPEEKVLPKHSLIYEKFTVYNELTKVRYKNEQGETYFFDSNIKQEIFDGVFKEHRKVSKKKLLDFLAKEYEEFRIVDVIGLDKENKAFNASLG | |
| | TYHDLEKILDKDFLDNPDNESILEDIVQTLTLFEDREMIKKRLENYKDLFTESQLKKLYRRHYTGWGRLSAKLINGIRDKESQKTILDYLIDDGRSNRNFMQLINDDGLSFKSIISKAQ | |
| | AGSHSDNLKEVVGELAGSPAIKKGILQSLKIVDELVKVMGYEPEQIVVEMARENQTTNQGRRNSRQRYKLLDDGVKNLASDLNGNILKEYPTDNQALQNERLFLYYLQNGRDMYTGEAL | |
| | DIDNLSQYDIDHIIPQAFIKDDSIDNRVLVSSAKNRGKSDDVPSLEIVKDCKVFWKKLLDAKLMSQRKYDNLTKAERGGLTSDDKARFIQRQLVETRQITKHVARILDERFNNELDSKG | |
| | RRIRKVKIVTLKSNLVSNFRKEFGFYKIREVNNYHHAHDAYLNAVVAKAILTKYPQLEPEFVYGDYPKYNSYKTRKSATEKLFFYSNIMNFFKTKVTLADGTVVVKDDIEVNNDTGEIV | |
| | WDKKKHFATVRKVLSYPQNNIVKKTEIQTGGFSKESILAHGNSDKLIPRKTKDIYLDPKKYGGFDSPIVAYSVLVVADIKKGKAQKLKTVTELLGITIMERSRFEKNPSAFLESKGYLN | |
| | IRADKLIILPKYSLFELENGRRRLLASAGELQKGNELALPTQFMKFLYLASRYNESKGKPEEIEKKQEFVNQHVSYFDDILQLINDFSKRVILADANLEKINKLYQDNKENISVDELAN | |
| | NIINLFTFTSLGAPAAFKFFDKIVDRKRYTSTKEVLNSTLIHQSITGLYETRIDLGKLGED | |
| 327 | MNKPYSIGLDIGTNSVGWSIITDDYKVPAKKMRVLGNTDKEYIKKNLIGALLFDGGNTAADRRLKRTSRRRYTRRRNRILYLQEIFAEEMSKVDDSFFHRLEDSFLVEEDKRGSKYPIF | WP_001040105.1 |
| | ATLQEEKDYHEKFSTIYHLRKELADKKEKADLRLIYIALAHIIKFRGHFLIEDDSFDVRNTDISKQYQDFLEIFNTTFENNDLLSQNVDVEAILTDKISKSAKKDRILAQYPNQKSTGI | [Streptococcus |
| | FAEFLKLIVGNQADFKKYFNLEDKTPLQFAKDSYDEDLENLLGQIGDEFADLFSAAKKLYDSVLLSGILTVIDLSTKAPLSASMIQRYDEHREDLKQLKQFVKASLPEKYQEIFADSSK | agalactiae] |
| | DGYAGYIEGKTNQEAFYKYLSKLLTKQEDSENFLEKIKNEDFLRKQRTFDNGSIPHQVHLTELKAIIRRQSEYYPFLKENQDRIEKILTFRIPYYIGPLAREKSDFAWMTRKTDDSIRP | |
| | WNFEDLVDKEKSAEAFIHRMTNNDFYLPEEKVLPKHSLIYEKFTVYNELTKVRYKNEQGETYFFDSNIKQEIFDGVFKEHRKVSKKKLLDFLAKEYEEFRIVDVIGLDKENKAFNASLG | |
| | TYHDLEKILDKDFLDNPDNESILEDIVQTLTLFEDREMIKKRLENYKDLFTESQLKKLYRRHYTGWGRLSAKLINGIRDKESQKTILDYLIDDGRSNRNFMQLINDDGLSFKSIISKAQ | |
| | AGSHSDNLKEVVGELAGSPAIKKGILQSLKIVDELVKVMGYEPEQIVVEMARENQTTNQGRRNSRQRYKLLDDGVKNLASDLNGNILKEYPTDNQALQNERLFLYYLQNGRDMYTGEAL | |
| | DIDNLSQYDIDHIIPQAFIKDDSIDNRVLVSSAKNRGKSDDVPSLEIVKDCKVFWKKLLDAKLMSQRKYDNLTKAERGGLTSDDKARFIQRQLVETRQITKHVARILDERFNNELDSKG | |
| | RRIRKVKIVTLKSNLVSNFRKEFGFYKIREVNNYHHAHDAYLNAVVAKAILTKYPQLEPEFVYGDYPKYNSYKTRKSATEKLFFYSNIMNFFKTKVTLADGTVVVKDDIEVNNDTGEIV | |
| | WDKKKHFATVRKVLSYPQNNIVKKTEIQTGGFSKESILAHGNSDKLIPRKTKDIYLDPKKYGGFDSPIVAYSVLVVADIKKGKAQKLKTVTELLGITIMERSRFEKNPSAFLESKGYLN | |
| | IRADKLIILPKYSLFELENGRRRLLASAGELQKGNELALPTQFMKFLYLASRYNESKGKPEEIEKKQEFVNQHVSYFDDILQLINDFSKRVILADANLEKINKLYQDNKENISVDELAN | |
| | NIINLFTFTSLGAPAAFKFFDKIVDRKRYTSTKEVLNSTLIHQSITGLYETRIDLGKLGED | |
| 328 | MNKPYSIGLDIGTNSVGWSIITDDYKVPAKKMRVLGNTDKEYIKKNLIGALLFDGGNTASDRRLKRTARRRYTRRRNRILYLQEIFAEEMSKVDDSFFHRLEDSFLVEDDKRGSKYPIF | WP_017647151.1 |
| | ATMQEEKDYHEKFPTIYHLRKELADKKEKADLRLFYLALAHIIKFRGHFLIEDDSFDVRNTDIQRQYQAFLEIFDTTFENNHLLSQNIDIEGILTDKISKSAKKDRILAQYPNQKSTGI | [Streptococcus |
| | FAEFLKLIVGNQADFKKHFNLEDKTPLQFAKDSYDEDLENLLGQIGDEFADLFSVAKKLYDSVLLSGILTVTDLSTKAPLSASMIQRYDEHREDLKQLKQFVKASLPEKYQEIFTDSSK | agalactiae] |
| | DGYAGYIEGKTNQGAFYKYLSKLLTKQEGSEYFLEKIKNEDFLRKQRTFDNGSIPHQVHLTELKAIIRRQSEYYPFLKENLDRIEKILTFRIPYYVGPLAREKSDFAWMTRKTDDSIRP | |
| | WNFEELVDKEASAEAFIHRMTNNDLYLPEEKVLPKHSLIYEKFTVYNELTKVRYKNEQGETYFFDSNIKQEIFDGVFKEHRKVSKKKLLDFLAKEYEEFRIVDVIGLDKENKAFNASLG | |
| | TYHDLKKILDKDFLDNPDNESILEDIVQTLTLFEDREMIKKRLENYKDLFTESQLKKLYRRHYTGWGRLSAKLINGIRDKESQKTILDYLIDDGKSNRNFMQLIHDDGLSFKSIISKAQ | |
| | AGSHSDNLKEVVGELAGSPAIKKGILQSLKIVDELVKVMGYEPEQIVVEMARENQTTNQGRRNSRQRYKLLDDGVKNLASDLNGNILKEYPTDNQALQNERLFLYYLQNGRDMYTGKAL | |
| | DIDNLSQYDIDHIIPQAFIKDDSIDNRVLVSSAKNRGKSDDVPSLEIVKDCKVFWKKLLDAKLMSQRKYDNLTKAERGGLTSDDKARFIQRQLVETRQITKHVARILDERFNNELDSKG | |
| | RRIRKVKIVTLKSNLVSNFRKEFGFYKIREVNNYHHAHDAYLNAVVAKAILTKYPQLEPEFVYGDYPKYNSYKTRKSATEKLFFYSNIMNFFKTKVTLADGTVVVKDDIEVNNDTGEIV | |
| | WDKKKHFATVRKVLSYPQVNIVKKTEIQTGGFSKESILAHGNSDKLIPRKTKDIYLDPKKYGGFDSPIVAYSVLVVADIKKGKAQKLKTVTELLGITIMERSRFEKNPSAFLESKGYLN | |
| | IRDDKLMILPKYSLFELENGRRRLLASAGELQKGNELALPTQFMKFLYLASRYNELKGKPEEIEQKQEFVVQHVSYFDDILQIINDFSNRVILADANLEKINKLYQDNKENISVDELAN | |
| | NIINLFTFTSLGAPAAFKFFDKIVDRKRYTSTKEVLNSTLIHQSITGLYETRIDLGKLGED | |
| 329 | MNKPYSIGLDIGTNSVGWSIITDDYKVPAKKMRVLGNTDKEYIKKNLIGALLFDGGNTASDRRLKRTARRRYTRRRNRILYLQEIFAEEMSKVDDSFFHRLEDSFLVEDDKRGSKYPIF | WP_017648376.1 |
| | ATMQEEKDYHEKFPTIYHLRKELADKKEKADLRLFYLALAHIIKFRGHFLIEDDSFDVRNTDIQRQYQAFLEIFDTTFENNHLLSQNIDVEGILTDKISKSAKKDRILAQYPNQKSTGI | [Streptococcus |
| | FAEFLKLIVGNQADFKKHFNLEDKTPLQFAKDSYDEDLENLLGQIGDEFADLFSVAKKLYDSVLLSGILTVTDLSTKAPLSASMIQRYDEHREDLKQLKQFVKASLPEKYQEIFTDSSK | agalactiae] |
| | DGYAGYIEGKTNQGAFYKYLSKLLTKQEGSEYFLEKIKNEDFLRKQRTFDNGSIPHQVHLTELKAIIRRQSEYYPFLKENLDRIEKILTFRIPYYVGPLAREKSDFAWMTRKTDDSIRP | |
| | WNFEELVDKEASAEAFIHRMTNNDLYLPEEKVLPKHSLIYEKFTVYNELTKVRYKNEQGETYFFDSNIKQEIFDGVFKEHRKVSKKKLLDFLAKEYEEFRIVDVIGLDKENKAFNASLG | |
| | TYHDLKKILDKDFLDNPDNESILEDIVQTLTLFEDREMIKKRLENYKDLFTESQLKKLYRRHYTGWGRLSAKLINGIRDKESQKTILDYLIDDGKSNRNFMQLIHDDGLSFKSIISKAQ | |
| | AGSHSDNLKEVVGELAGSPAIKKGILQSLKIVDELVKVMGYEPEQIVVEMARENQTTNQGRRNSRQRYKLLDDGVKNLASDLNGNILKEYPTDNQALQNERLFLYYLQNGRDMYTGKAL | |
| | DIDNLSQYDIDHIIPQAFIKDDSIDNRVLVSSAKNRGKSDDVPSLEIVKDCKVFWKKLLDAKLMSQRKYDNLTKAERGGLTSDDKARFIQRQLVETRQITKHVARILDERFNNELDSKG | |
| | RRIRKVKIVTLKSNLVSNFRKEFGFYKIREVNNYHHAHDAYLNAVVAKAILTKYPQLEPEFVYGDYPKYNSYKTRKSATEKLFFYSNIMNFFKTKVTLADGTVVVKDDIEVNNDTGEIV | |
| | WDKKKHFATVRKVLSYPQVNIVKKTEIQTGGFSKESILAHGNSDKLIPRKTKDIYLDPKKYGGFDSPIVAYSVLVVADIKKGKAQKLKTVTELLGITIMERSRFEKNPSAFLESKGYLN | |
| | IRDDKLMILPKYSLFELENGRRRLLASAGELQKGNELALPTQFMKFLYLASRYNELKGKPEEIEQKQEFVVQHVSYFDDILQIINDFSNRVILADANLEKINKLYQDNKENISVDELAN | |
| | NIINLFTFTSLGAPAAFKFFDKIVDRKRYTSTKEVLNSTLIHQSITGLYETRIDLGKLGED | |
| 330 | MNKPYSIGLDIGTNSVGWSIITDDYKVPAKKMRVLGNTDKEYIKKNLIGALLFDGRNTAADRRLKRTARRRYTRRRNRILYLQEIFAEEMSKVDDSFFHRLEDSFLVEEDKRGSKYPIF | WP_047207273.1 |
| | ATLQEEKDYHEKFSTIYHLRKELADKKEKADLRLIYIALAHIIKFRGHFLIEDDSFDVRNTDISKQYQDFLEIFNTTFENNDLLSQNVDVEAILTDKISKSAKKDRILAQYPNQKSTGI | [Streptococcus |
| | FAEFLKLIVGNQADFKKYFNLEDKTPLQFAKDSYDEDLENLLGQIGDEFADLFSAAKKLYDSVLLSGILTVIDLSTKAPLSASMIQRYDEHREDLKQLKQFVKASLPEKYQEIFADSSK | agalactiae] |
| | DGYAGYIEGKTNQEAFYKYLSKLLTKQEDSENFLEKIKNEDFLRKQRTFDNGSIPHQVHLTELKAIIRRQSEYYPFLKENQDRIEKILTFRIPYYIGPLAREKSDFAWMTRKTDDSIRP | |
| | WNFEDLVDKEKSAEAFIHRMTNNDFYLPEEKVLPKHSLIYEKFTVYNELTKVRYKNEQGETYFFDSNIKQEIFDGVFKEHRKVSKKKLLDFLAKEYEEFRIVDVIGLDKENKAFNASLG | |
| | TYHDLEKILDKDFLDNPDNESILEDIVQTLTLFEDREMIKKRLENYKDLFTESQLKKLYRRHYTGWGRLSAKLINGIRDKESQKTILDYLIDDGRSNRNFMQLINDDGLSFKSIISKAQ | |
| | AGSHSDNLKEVVGELAGSPAIKKGILQSLKIVDELVKVMGYEPEQIVVEMARENQTTNQGRRNSRQRYKLLDDGVKNLASDLNGNILKEYPTDNQALQNERLFLYYLQNGRDMYTGEAL | |
| | DIDNLSQYDIDHIIPQAFIKDDSIDNRVLVSSAKNRGKSDDVPSLEIVKDCKVFWKKLLDAKLMSQRKYDNLTKAERGGLTSDDKARFIQRQLVETRQITKHVARILDERFNNELDSKG | |
| | RRIRKVKIVTLKSNLVSNFRKEFGFYKIREVNNYHHAHDAYLNAVVAKAILTKYPQLEPEFVYGDYPKYNSYKTRKSATEKLFFYSNIMNFFKTKVTLADGTVVVKDDIEVNNDTGEIV | |
| | WDKKKHFATVRKVLSYPQNNIVKKTEIQTGGFSKESILAHGNSDKLIPRKTKDIYLDPKKYGGFDSPIVAYSVLVVADIKKGKAQKLKTVTELLGITIMERSRFEKNPSAFLESKGYLN | |
| | IRADKLIILPKYSLFELENGRRRLLASAGELQKGNELALPTQFMKFLYLASRYNESKGKPEEIEKKQEFVNQHVSYFDDILQLINDFSKRVILADANLEKINKLYQDNKENISVDELAN | |
| | NIINLFTFTSLGAPAAFKFFDKIVDRKRYTSTKEVLNSTLIHQSITGLYETRIDLGKLGED | |
| 331 | MNKPYSIGLDIGTNSVGYSVVTDDYKVPAKKMRVLGNTDKEYIKKNLIGALLFDGGNTASDRRLKRTARRRYTCRRNRILYLQEIFAEEMSKVDDSFFHRLEDSFLVEDDKRGSKYPIF | WP_001040106.1 |
| | ATMQEEKDYHEKFPTIYHLRKELADKKEKANLRLVYLALAHIIKFRGHFLIEDDSFDVRNTDIQRQYQAFLEIFDTTFENNHLLSQNIDVEGILTDKISKSAKKDRILAQYPNQKSTGI | [Streptococcus |
| | FAEFLKLIVGNQADFKKHFNLEDKTPLQFAKDSYDEDLENLLGQIGDEFADLFSVAKKLYDSVLLSGILTVTDLSTKAPLSASMIQRYDEHREDLKQLKQFVKASLPEKYQEIFTDSSK | agalactiae] |
| | DGYAGYIEGKTNQGAFYKYLSKLLTKQEGSEYFLEKIKNEDFLRKQRTFDNGSIPHQVHLTELKAIIRRQSEYYPFLKENLDRIEKILTFRIPYYVGPLAREKSDFAWMTRKTDDSIRP | |
| | WNFEELVDKEASAEAFIHRMTNNDLYLPEEKVLPKHSLIYEKFTVYNELTKVRYKNEQGETYFFDSNIKQEIFDGVFKEHRKVSKKKLLDFLAKEYEEFRIVDVIGLDKENKAFNASLG | |
| | TYHDLKKILDKDFLDNPDNESILEDIVQTLTLFEDREMIKKRLENYKDLFTESQLKKLYRRHYTGWGRLSAKLINGIRDKESQKTILDYLISDGRANRNFMQLIHDDGLSFKPIIDKAQ | |
| | AGSHSDNLKEVVGELAGSPAIKKGILQSLKIVDELVKVMGYEPEQVVVEMARENQTTNQGRRNTRQRYKLLEEGVKNLASDLNGNILKEYPTDNQALQNERLFLYYLQNGRDMYTGEAL | |
| | DIDNLSQYDIDHIVPQAFIKDDSIDNRVLVSSAKNRGKSDNVPSIDIVKARKAFWKKLLDAKLMSQRKYDNLTKAERGGLTSDDKARFIQRQLVETRQITKHVARILDERFNNELDSKG | |
| | RRIRKVKIVTLKSNLVSNFRKEFGFYKIREVNDYHHAHDAYLNAVVAKAILTKYPQLEPEFVYGDYPKYNSYKTRKSATEKLFFYSNIMNFFKTKVTLADGTVVVKDDIEVNNDTGEIV | |
| | WDKKKHFATVRKVLSYPQVNIVKKTEIQTGGFSKESILAHGNSDKLIPRKTKDIYLDPKKYGGFDSPIVAYSVLVVADIKKGKAQKLKTVTELLGITIMERFRFEKNPSAFLESKGYLN | |
| | IRDDKLMILPKYSLFELENGRRRLLASAGELQKGNELALPTQYMKFLYLASRYNELKGKPEEIEQKQEFVVQHVSYFDDILQIINDFSNRVILADANLEKINKLYQDNKENISVDELAN | |
| | NIINLFTFTSLGAPAAFKFFDKIVDRKRYTSTKEVLNSTLIHQSITGLYETRIDLGKLGED | |
| 332 | MNKPYSIGLDIGTNSVGYSVVTDDYKVPAKKMRVLGNTDKEYIKKNLIGALLFDGGNTASDRRLKRTARRRYTRRRNRILYLQEIFAEEMSKVDDSFFHRLEDSFLVEDDKRGSKYPIF | WP_001040107.1 |
| | ATMQEEKDYHEKFPTIYHLRKELADKKEKADLRLVYLALAHIIKFRGHFLIEDDSFDVRNTDIQRQYQAFLEIFDTTFENNHLLSQNIDVEGILTDKISKSAKKDRILAQYPNQKSTGI | [Streptococcus |
| | FAEFLKLIVGNQADFKKHFNLEDKTPLQFAKDSYDEDLENLLGQIGDEFADLFSVAKKLYDSVLLSGILTVTDLSTKAPLSASMIQRYDEHREDLKQLKQFVKASLPEKYQEIFTDSSK | agalactiae] |
| | DGYAGYIEGKTNQGAFYKYLSKLLTKQEGSEYFLEKIKNEDFLRKQRTFDNGSIPHQVHLTELKAIIRRQSEYYPFLKENLDRIEKILTFRIPYYVGPLAREKSDFAWMTRKTDDSIRP | |
| | WNFEELVDKEASAEAFIHRMTNNDLYLPEEKVLPKHSLIYEKFTVYNELTKVRYKNEQGETYFFDSNIKQEIFDGVFKEHRKVSKKKLLDFLAKEYEEFRIVDVIGLDKENKAFNASLG | |
| | TYHDLKKILDKDFLDNPDNESILEDIVQTLTLFEDREMIKKRLENYKDLFTESQLKKLYRRHYTGWGRLSAKLINGIRDKESQKTILDYLISDGRANRNFMQLIHDDGLSFKPIIDKAQ | |
| | AGSHSDNLKEVVGELAGSPAIKKGILQSLKIVDELVKVMGYEPEQVVVEMARENQTTNQGRRNTRQRYKLLEEGVKNLASDLNGNILKEYPTDNQALQNERLFLYYLQNGRDMYTGEAL | |
| | DIDNLSQYDIDHIVPQAFIKDDSIDNRVLVSSAKNRGKSDNVPSIDIVKARKAFWKKLLDAKLMSQRKYDNLTKAERGGLTSDDKARFIQRQLVETRQITKHVARILDERFNNELDSKG | |
| | RRIRKVKIVTLKSNLVSNFRKEFGFYKIREVNDYHHAHDAYLNAVVAKAILTKYPQLEPEFVYGDYPKYNSYKTRKSATEKLFFYSNIMNFFKTKVTLADGTVVVKDDIEVNNDTGEIV | |
| | WDKKKHFATVRKVLSYPQVNIVKKTEIQTGGFSKESILAHGNSDKLIPRKTKDIYLDPKKYGGFDSPIVAYSVLVVADIKKGKAQKLKTVTELLGITIMERFRFEKNPSAFLESKGYLN | |
| | IRDDKLMILPKYSLFELENGRRRLLASAGELQKGNELALPTQYMKFLYLASRYNELKGKPEEIEQKQEFVVQHVSYFDDILQIINDFSNRVILADANLEKINKLYQDNKENISVDELAN | |
| | NIINLFTFTSLGAPAAFKFFDKIVDRKRYTSTKEVLNSTLIHQSITGLYETRIDLGKLGED | |
| 333 | MNKPYSIGLDIGTNSVGYSVVTDDYKVPAKKMRVLGNTDKEYIKKNLIGALLFDGGNTASDRRLKRTARRRYTRRRNRILYLQEIFAEEMSKVDDSFFHRLEDSFLVEDDKRGSKYPIF | WP_001040108.1 |
| | ATMQEEKDYHEKFPTIYHLRKELADKKEKADLRLVYLALAHIIKFRGHFLIEDDSFDVRNTDIQRQYQAFLEIFDTTFENNHLLSQNIDVEGILTDKISKSAKKDRILAQYPNQKSTGI | [Streptococcus |
| | FAEFLKLIVGNQADFKKHFNLEDKTPLQFAKDSYDEDLENLLGQIGDEFADLFSVAKKLYDSVLLSGILTVTDLSTKAPLSASMIQRYDEHREDLKQLKQFVKASLPEKYQEIFTDSSK | agalactiae] |
| | DGYAGYIEGKTNQGAFYKYLSKLLTKQEGSEYFLEKIKNEDFLRKQRTFDNGSIPHQVHLTELKAIIRRQSEYYPFLKENLDRIEKILTFRIPYYVGPLAREKSDFAWMTRKTDDSIRP | |
| | WNFEELVDKEASAEAFIHRMTNNDLYLPEEKVLPKHSLIYEKFTVYNELTKVRYKNEQGETYFFDSNIKQEIFDGVFKEHRKVSKKKLLDFLAKEYEEFRIVDVIGLDKENKAFNASLG | |
| | TYHDLKKILDKDFLDNPDNESILEDIVQTLTLFEDREMIKKRLENYKDLFTESQLKKLYRRHYTGWGRLSAKLINGIRDKESQKTILDYLISDGRANRNFMQLIHDDGLSFKPIIDKAQ | |
| | AGSHSDNLKEVVGELAGSPAIKKGILQSLKIVDELVKVMGYEPEQVVVEMARENQTTNQGRRNTRQRYKLLEEGVKNLASDLNGNILKEYPTDNQALQNERLFLYYLQNGRDMYTGETL | |
| | DIDNLSQYDIDHIVPQAFIKDDSIDNRVLVSSAKNRGKSDNVPSIDIVKARKAFWKKLLDAKLMSQRKYDNLTKAERGGLTSDDKARFIQRQLVETRQITKHVARILDERFNNELDSKG | |
| | RRIRKVKIVTLKSNLVSNFRKEFGFYKIREVNDYHHAHDAYLNAVVAKAILTKYPQLEREFVYGDYPKYNSYKTRKSATEKLFFYSNIMNFFKTKVTLADGTVVVKDDIEVNNDTGEIV | |
| | WDKKKHFATVRKVLSYPQVNIVKKTEIQTGGFSKESILAHGNSDKLIPRKTKDIYLDPKKYGGFDSPIVAYSVLVVADIKKGKAQKLKTVTELLGITIMERFRFEKNPSAFLESKGYLN | |
| | IRDDKLMILPKYSLFELENGRRRLLASAGELQKGNELALPTQYMKFLYLASRYNELKGKPEEIEQKQEFVVQHVSYFDDILQIINDFSNRVILADANLEKINKLYQDNKENISVDELAN | |
| | NIINLFTFTSLGAPAAFKFFDKIVDRKRYTSTKEVLNSTLIHQSITGLYETRIDLGKLGED | |
| 334 | MNKPYSIGLDIGTNSVGYSVVTDDYKVPAKKMRVLGNTDKEYIKKNLIGALLFDGGNTASDRRLKRTARRRYTRRRNRILYLQEIFAEEMSKVDDSFFHRLEDSFLVEDDKRGSKYPIF | WP_017771611.1 |
| | ATMQEEKDYHEKFPTIYHLRKELADKKEKADLRLVYLALAHIIKFRGHFLIEDDSFDVRNTDIQRQYQAFLEIFDTTFENNHLLSQNIDVEGILTDKISKSAKKDRILAQYPNQKSTGI | [Streptococcus |
| | FAEFLKLIVGNQADFKKHFNLEDKTPLQFAKDSYDEDLENLLGQIGDEFADLFSVAKKLYDSVLLSGILTVTALSTKAPLSASMIQRYDEHREDLKQLKQFVKASLPEKYQEIFTDSSK | agalactiae] |
| | DGYAGYIEGKTNQGAFYKYLSKLLTKQEGSEYFLEKIKNEDFLRKQRTFDNGSIPHQVHLTELKAIIRRQSEYYPFLKENLDRIEKILTFRIPYYVGPLAREKSDFAWMTRKTDDSIRP | |
| | WNFEELVDKEASAEAFIHRMTNNDLYLPEEKVLPKHSLIYEKFTVYNELTKVRYKNEQGETYFFDSNIKQEIFDGVFKEHRKVSKKKLLDFLAKEYEEFRIVDVIGLDKENKAFNASLG | |
| | TYHDLKKILDKDFLDNPDNESILEDIVQTLTLFEDREMIKKRLENYKDLFTESQLKKLYRRHYTGWGRLSAKLINGIRDKESQKTILDYLISDGRANRNFMQLIHDDGLSFKPIIDKAQ | |
| | AGSHSDNLKEVVGELAGSPAIKKGILQSLKIVDELVKVMGYEPEQVVVEMARENQTTNQGRRNTRQRYKLLEEGVKNLASDLNGNILKEYPTDNQALQNERLFLYYLQNGRDMYTGEAL | |
| | DIDNLSQYDIDHIVPQAFIKDDSIDNRVLVSSAKNRGKSDNVPSIDIVKARKAFWKKLLDAKLMSQRKYDNLTKAERGGLTSDDKARFIQRQLVETRQITKHVARILDERFNNELDSKG | |
| | RRIRKVKIVTLKSNLVSNFRKEFGFYKIREVNDYHHAHDAYLNAVVAKAILTKYPQLEPEFVYGDYPKYNSYKTRKSATEKLFFYSNIMNFFKTKVTLADGTVVVKDDIEVNNDTGEIV | |
| | WDKKKHFATVRKVLSYPQVNIVKKTEIQTGGFSKESILAHGNSDKLIPRKTKDIYLDPKKYGGFDSPIVAYSVLVVADIKKGKAQKLKTVTELLGITIMERFRFEKNPSAFLESKGYLN | |
| | IRDDKLMILPKYSLFELENGRRRLLASAGELQKGNELALPTQYMKFLYLASRYNELKGKPEEIEQKQEFVVQHVSYFDDILQIINDFSNRVILADANLEKINKLYQDNKENISVDELAN | |
| | NIINLFTFTSLGAPAAFKFFDKIVDRKRYTSTKEVLNSTLIHQSITGLYETRIDLGKLGED | |
| 335 | MNKPYSIGLDIGTNSVGYSVVTDDYKVPAKKMRVLGNTDKEYIKKNLIGALLFDGGNTASDRRLKRTARRRYTRRRNRILYLQEIFAEEMSKVDDSFFHRLEDSFLVEDDKRGSKYPIF | WP_001040109.1 |
| | ATMQEEKDYHEKFPTIYHLRKELADKKEKANLRLVYLALAHIIKFRGHFLIEDDSFDVRNTDIQRQYQAFLEIFDTTFENNHLLSQNIDVEGILTDKISKSAKKDRILAQYPNQKSTGI | [Streptococcus |
| | FAEFLKLIVGNQADFKKHFNLEDKTPLQFAKDSYDEDLENLLGQIGDEFADLFSVAKKLYDSVLLSGILTVTDLSTKAPLSASMIQRYDEHREDLKQLKQFVKASLPEKYQEIFTDSSK | agalactiae] |
| | DGYAGYIEGKTNQGAFYKYLSKLLTKQEGSEYFLEKIKNEDFLRKQRTFDNGSIPHQVHLTELKAIIRRQSEYYPFLKENLDRIEKILTFRIPYYVGPLAREKSDFAWMTRKTDDSIRP | |
| | WNFEELVDKEASAEAFIHRMTNNDLYLPEEKVLPKHSLIYEKFTVYNELTKVRYKNEQGETYFFDSNIKQEIFDGVFKEHRKVSKKKLLDFLAKEYEEFRIVDVIGLDKENKAFNASLG | |
| | TYHDLKKILDKDFLDNPDNESILEDIVQTLTLFEDREMIKKRLENYKDLFTESQLKKLYRRHYTGWGRLSAKLINGIRDKESQKTILDYLISDGRANRNFMQLIHDDGLSFKPIIDKAQ | |
| | AGSHSDNLKEVVGELAGSPAIKKGILQSLKIVDELVKVMGYEPEQVVVEMARENQTTNQGRRNTRQRYKLLEEGVKNLASDLNGNILKEYPTDNQALQNERLFLYYLQNGRDMYTGEAL | |
| | DIDNLSQYDIDHIVPQAFIKDDSIDNRVLVSSAKNRGKSDNVPSIDIVKARKAFWKKLLDAKLMSQRKYDNLTKAERGGLTSDDKARFIQRQLVETRQITKHVARILDERFNNELDSKG | |
| | RRIRKVKIVTLKSNLVSNFRKEFGFYKIREVNDYHHAHDAYLNAVVAKAILTKYPQLEPEFVYGDYPKYNSYKTRKSATEKLFFYSNIMNFFKTKVTLADGTVVVKDDIEVNNDTGEIV | |
| | WDKKKHFATVRKVLSYPQVNIVKKTEIQTGGFSKESILAHGNSDKLIPRKTKDIYLDPKKYGGFDSPIVAYSVLVVADIKKGKAQKLKTVTELLGITIMERFRFEKNPSAFLESKGYLN | |
| | IRDDKLMILPKYSLFELENGRRRLLASAGELQKGNELALPTQYMKFLYLASRYNELKGKPEEIEQKQEFVVQHVSYFDDILQIINDFSNRVILADANLEKINKLYQDNKENISVDELAN | |
| | NIINLFTFTSLGAPAAFKFFDKIVDRKRYTSTKEVLNSTLIHQFITGLYETRIDLGKLGED | |
| 336 | MNKPYSIGLDIGTNSVGYSVVTDDYKVPAKKMRVLGNTDKEYIKKNLIGALLFDGGNTASDRRLKRTARRRYTRRRNRILYLQEIFAEEMSKVDDSFFHRLEDSFLVEDDKRGSKYPIF | WP_001040110.1 |
| | ATMQEEKDYHEKFPTIYHLRKELADKKEKANLRLVYLALAHIIKFRGHFLIEDDSFDVRNTDIQRQYQAFLEIFDTTFENNHLLSQNIDVEGILTDKISKSAKKDRILAQYPNQKSTGI | [Streptococcus |
| | FAEFLKLIVGNQADFKKHFNLEDKTPLQFAKDSYDEDLENLLGQIGDEFADLFSVAKKLYDSVLLSGILTVTDLSTKAPLSASMIQRYDEHREDLKQLKQFVKASLPEKYQEIFTDSSK | agalactiae] |
| | DGYAGYIEGKTNQGAFYKYLSKLLTKQEGSEYFLEKIKNEDFLRKQRTFDNGSIPHQVHLTELKAIIRRQSEYYPFLKENLDRIEKILTFRIPYYVGPLAREKSDFAWMTRKTDDSIRP | |
| | WNFEELVDKEASAEAFIHRMTNNDLYLPEEKVLPKHSLIYEKFTVYNELTKVRYKNEQGETYFFDSNIKQEIFDGVFKEHRKVSKKKLLDFLAKEYEEFRIVDVIGLDKENKAFNASLG | |
| | TYHDLKKILDKDFLDNPDNESILEDIVQTLTLFEDREMIKKRLENYKDLFTESQLKKLYRRHYTGWGRLSAKLINGIRDKESQKTILDYLISDGRANRNFMQLIHDDGLSFKPIIDKAQ | |
| | AGSHSDNLKEVVGELAGSPAIKKGILQSLKIVDELVKVMGYEPEQVVVEMARENQTTNQGRRNTRQRYKLLEEGVKNLASDLNGNILKEYPTDNQALQNERLFLYYLQNGRDMYTGEAL | |
| | DIDNLSQYDIDHIVPQAFIKDDSIDNRVLVSSAKNRGKSDNVPSIDIVKARKAFWKKLLDAKLMSQRKYDNLTKAERGGLTSDDKARFIQRQLVETRQITKHVARILDERFNNELDSKG | |
| | RRIRKVKIVTLKSNLVSNFRKEFGFYKIREVNDYHHAHDAYLNAVVAKAILTKYPQLEPEFVYGDYPKYNSYKTRKSATEKLFFYSNIMNFFKTKVTLADGTVVVKDDIEVNNDTGEIV | |
| | WDKKKHFATVRKVLSYPQVNIVKKTEIQTGGFSKESILAHGNSDKLIPRKTKDIYLDPKKYGGFDSPIVAYSVLVVADIKKGKAQKLKTVTELLGITIMERFRFEKNPSAFLESKGYLN | |
| | IRDDKLMILPKYSLFELENGRRRLLASAGELQKGNELALPTQYMKFLYLASRYNELKGKPEEIEQKQEFVVQHVSYFDDILQIINDFSNRVILADANLEKINKLYQDNKENISVDELAN | |
| | NIINLFTFTSLGAPAAFKFFDKIVDRKRYTSTKEVLNSTLIHQSITGLYETRIDLGKLGED | |
| 337 | MNKPYSIGLDIGTNSVGYSVVTDDYKVPAKKMRVLGNTDKEYIKKNLIGALLFDGGNTASDRRLKRTARRRYTRRRNRILYLQEIFAEEMSKVDDSFFHRLEDSFLVEDDKRGSKYPIF | WP_050204027.1 |
| | ATMQEEKDYHEKFPTIYHLRKELADKKEKANLRLVYLALAHIIKFRGHFLIEDDSFDVRNTDIQRQYQAFLEIFDTTFENNHLLSQNIDVEGILTDKISKSAKKDRILAQYPNQKSTGI | [Streptococcus |
| | FAEFLKLIVGNQADFKKHFNLEDKTPLQFAKDSYDEDLENLLGQIGDEFADLFSVAKKLYDSVLLSGILTVTDLSTKAPLSASMIQRYDEHREDLKQLKQFVKASLPEKYQEIFTDSSK | agalactiae] |
| | DGYAGYIESKTNQGAFYKYLSKLLTKQEGSEYFLEKIKNEDFLRKQRTFDNGSIPHQVHLTELKAIIRRQSEYYPFLKENLDRIEKILTFRIPYYVGPLAREKSDFAWMTRKTDDSIRP | |
| | WNFEELVDKEASAEAFIHRMTNNDLYLPEEKVLPKHSLIYEKFTVYNELTKVRYKNEQGETYFFDSNIKQEIFDGVFKEHRKVSKKKLLDFLAKEYEEFRIVDVIGLDKENKAFNASLG | |
| | TYHDLKKILDKDFLDNPDNESILEDIVQTLTLFEDREMIKKRLENYKDLFTESQLKKLYRRHYTGWGRLSAKLINGIRDKESQKTILDYLISDGRANRNFMQLIHDDGLSFKPIIDKAQ | |
| | AGSHSDNLKEVVGELAGSPAIKKGILQSLKIVDELVKVMGYEPEQVVVEMARENQTTNQGRRNTRQRYKLLEEGVKNLASDLNGNILKEYPTDNQALQNERLFLYYLQNGRDMYTGEAL | |
| | DIDNLSQYDIDHIVPQAFIKDDSIDNRVLVSSAKNRGKSDNVPSIDIVKARKAFWKKLLDAKLMSQRKYDNLTKAERGGLTSDDKARFIQRQLVETRQITKHVARILDERFNNELDSKG | |
| | RRIRKVKIVTLKSNLVSNFRKEFGFYKIREVNDYHHAHDAYLNAVVAKAILTKYPQLEPEFVYGDYPKYNSYKTRKSATEKLFFYSNIMNFFKTKVTLADGTVVVKDDIEVNNDTGEIV | |
| | WDKKKHFATVRKVLSYPQVNIVKKTEIQTGGFSKESILAHGNSDKLIPRKTKDIYLDPKKYGGFDSPIVAYSVLVVADIKKGKAQKLKTVTELLGITIMERFRFEKNPSAFLESKGYLN | |
| | IRDDKLMILPKYSLFELENGRRRLLASAGELQKGNELALPTQYMKFLYLASRYNELKGKPEEIEQKQEFVVQHVSYFDDILQIINDFSNRVILADANLEKINKLYQDNKENISVDELAN | |
| | NIINLFTFTSLGAPAAFKFFDKIVDRKRYTSTKEVLNSTLIHQSITGLYETRIDLGKLGED | |
| 338 | MNNKPYSIGLDIGTNSVGWAVITDDYKVPSKKMKVLGNTDKHFIKKNLLGALLFDEGTTAEDRRLKRTARRRYTRRKNRLRYLQEIFTEEMSKVDISFFHRLDDSFLVPEDKRGSKYPI | WP_045618028.1 |
| | FATLEEEKEYHKNFPTIYHLRKHLADSKEKADFRLIYLALAHIIKYRGHFLYEESFDIKNNDIQKIFNEFISIYDNTFEGSSLNGQNAQVEAIFTDKISKSAKRERVLKLFPDEKSTGL | [Streptococcus |
| | FSEFLKLIVGNQADFKKHFDLEEKAPLQFSKDTYDEDLENLLVQIGDDFADLFLVAKKLYDAILLSGILTVTDPSTKAPLSASMIDRYENHQKDLAALKQFIKTNLPEKYDEVFSDQSK | mitis] |
| | DGYAGYIDGKTTQEAFYKYIKNLLSKLEGADYFLDKIEREDFLRKQRTFDNGSIPHQIHLQEMNAIIRRQGEHYPFLQENKEKIEKILTFRIPYYVGPLARGNRDFAWLTRNSDQAIRP | |
| | WNFEEIVDKARSAEDFINKMTNYDLYLPEEKVLPKHSLLYETFAVYNELTKVKFIAEGLRDYQFLDSGQKQQIVTQLFKEKRKVTEKDIIQYLHNVDSYDGIELKGIEKQFNASLSTYH | |
| | DLLKIIKDKEFMDDSKNEAILENIVHTLTIFEDREMIKQRLAHYASIFDEKVIKALTRRHYTGWGKLSAKLINGIYDKQSKKTILDYLIDDGEINRNFMQLINDDGLSFKEIIQKAQVV | |
| | GKTNDVKQVVQELPGSPAIKKGILQSIKLVDELVKVMGHAPESIVIEMARENQTTARGKKNSQQRYKRIEDALKNLAHGLDSNILKEHPTDNIQLQNDRLFLYYLQNGKDMYTGKSLDI | |
| | NQLSSCDIDHIIPQAFIKDDSLDNRVLTSSKDNRGKSDNVPSLEIVQKRKAFWQQLLDSKLISERKFNNLTKAERGGLDERDKVGFIKRQLVETRQITKHVAQILDARFNTEVTEKDKK | |
| | DRSVKIITLKSNLVSNFRKEFRLYKVREINDYHHAHDPYLNAVVAKAILKKYPKLEPEFVYGDYQKYDLKRYISRTKDPKEVEKATEKYFFYSNLLNFFKEEVHYADGTIVKRENIEYS | |
| | KDTGEIAWNKEKDFATIKKVLSLPQVNIVKKTEEQTVGQNGGLFDNNIVSKKKVVDASKLTPIKSGLSPEKYGGYARPTIAYSVLVIADIEKGKAKKLKRIKEMVGITVQDKKKFEANP | |
| | IAYLEECGYKNINPNLIIKLPKYSLFEFNNGQRRLLASSIELQKGNELIVPYHFTALLYHAQRINKISEPIHKQYVETHQSEFKELLTAIISLSKKYIQKPNVESLLQQAFDQSDKDIY | |
| | QLSESFISLLKLISFGAPGTFKFLGVEISQSNVRYQSVSSCFNATLIHQSITGLYETRIDLSKLGED | |
| 339 | MNNNNYSIGLDIGTNSVGWAVITDDYKVPSKKMRVLGNTDKRFIKKNLIGALLFDEGTTAEDRRLKRTARRRYTRRKNRLRYLQEIFAEEMSKVDSSFFHRLDDSFLVPEDKSGSKYPI | WP_009754323.1 |
| | FATLAEEKEYHKKFPTIYHLRKHLADSKEKADLRLIYLALAHITKYRGHFLYEEAFDIKNNDIQKIFNEFINIYDNTFEGSSLSGQNAQVEAIFTGKISKSVKREHVLKLFPDEKSTGL | [Streptococcus |
| | FSEFLKLIVGNQADFKKHFDLEEKASLQFSKDTYDEDLENLLGQIGDDFADLFLVAKKLYDAILLSGILTVTDPSTKAPLSASMIERYENHQEDLAALKQFIKNNLPEKYAEVFSDQSK | sp. taxon 056] |
| | DGYAGYIDGKTTQEAFYKYIKNLLSKFEGADYFLDKIEREDFLRKQRTFDNGSIPHQIHLQEMNAILRRQGEHYPLLKENKEKIEKILTFRIPYYVGPLARGNRDFAWLTRNSDQAIRP | |
| | WNFEEIVDKASSAESFINKMTNYDLYLPEEKVLPKHSLLYETFAVYNELTKVKFIAEGLRDYQFFDSGQKKQIVNQLFKEKRKVTEKDIIHYLHNVDGYDGIELKGIEKQFNASLSTYH | |
| | DLLKIIKDKEFMDNHKNQEILENIVHTLTIFEDREMIKQRLAQYDSIFDEKVIKALTRRHYTGWGKLSAKLINGICDKKTGKTILDYLIDDGYNNRNFMQLINDDGLSFKEIIQKAQVV | |
| | GKTDDLTQVVRELSGSPAIKKGILQSIKIVDELVKIMGYAPESIVIEMARENQTTAKGKKNSQQRYKRIEDALKNLAPGLDSTISKENPTDNIQLQNDRLFLYYLQNGKDMYTGEALDI | |
| | NQLSSYDIDHIIPQAFIKDDSLDNRVLTSSKDNRGKSDNVPSLEVVKKRKAFWQQLLDSKLISERKFNNLTKAERGGLDERDKVGFIKRQLVETRQITKHVARILDARFNTEVSEKNQK | |
| | IRSVKIITLKSNLVSNFRKEFKLYKVREINDYHHAHDAYLNAVVAKAILKKYPKLEPEFVYGDYQKYDLKRYISKSKDPKEVEKATEKYFFYSNLLNFFKEEVHYADGTIVKRENIEYS | |
| | KDTGEIAWNKEKDFVTIKKVLSYPQVNIVKKREVQTGGFSKESILPKGNSDKLIPRKTKDILWDTTKYGGFDSPVIAYSILLIADIEKGKAKKLKTVKTLVGITIMEKAAFEKNPITFL | |
| | ENKGYHNVRKENILCLPKYSLFELENGRRRLLASAKELQKGNEIVLPVYLTTLLYHSKNVHKLDEPEHLEYIQKHRYEFKDLLNLVSEFSQKYVLAEANLEKIKSLYVDNEQADIEILA | |
| | NSFINLLTFTALGAPAAFKFFGKDVDRKRYTTVSEILNATLIHQSITGLYETRIDLSKLGED | |
| 340 | MNQKYSIGLDIGTNSVGWAVITDDYKVPAKKMKVLGNTDKQSIKKNLLGALLFDSGETAEATRLKRTARRRYTRRRNRLRYLQEIFAEEMMQVDESFFQRLDDSFLVDEDKRGERHPIF | WP_003041502.1 |
| | GNIAAEVKYHDEFPTIYHLRKHLADISQKADLRLVYLALAHMIKFRGHFLIEGQLKAENTNVQALFKDFVEVYDKTVEESHLSEITVDALSILTEKVSKSRRLENLIAHYPAEKKNTLF | [Streptococcus |
| | GNLIALFLGLQPNFKTNFQLSEDAKLQFSKDTYEEDLEGLLGEVGDEYADLFASAKNLYDAILLSGILTVDDNSTKAPLSASMVKRYEEHQKDLKKFEDFIKVNALDQYNAIFKDKNKK | anginosus] |
| | GYAGYIESGVKQDEFYKYLKGILLQINGSGDFLDKIDREDFLRKQRTFDNGSIPHQIHLQEMHAILRRQGEHYPFLKENQDKIEKILTFRIPYYVGPLARKGSRFAWAEYKADEKITPW | |
| | NFDDILDKEKSAEKFITRMTLNDLYLPEEKVLPKHSLLYETFTVYNELTKVKYVNEQGEAKFFDANMKQEIFDHVFKENRKVTKDKLLNYLNKEFEEFRIVNLTGLDKENKVFNSSLGT | |
| | YHDLRKILNKSFLDNKENAQIIEDIIQTLTLFEDREMIRQRLQKYSDIFTKAQLKKLERRHYTGWGRLSYKLINGIRNKENKKTILDYLIDDGYANRNFMQLINDDALSFKEEIAKAQI | |
| | IGDVDDIANVVHDLPGSPAIKKGILQSVKIVDELVKVMGHNPANIIIEMARENQTTDRGRRNSQQRLKLLQDSLKNLDNPVNIKNVENQQLQNDRLFLYYIQNGKDMYTGETLDINNLS | |
| | QYDIDHIIPQAYIKDDSFDNRVLTSSSENRGKSDNVPSIEVVCARKADWMRLRKAGLISQRKFDNLTKAERGGLTENDKAGFIKRQLVETRQITKHVAQVLDARFNAKHDENKKVIRDV | |
| | KIITLKSNLVSQFRKDFKFYKVREINDYHHAHDAYLNAVIGTALLKKYPKLASEFVYGEFKKYDVRKFIAKSDKEIGKATAKYFFYSNLMNFFKKEVKFADGTVVERPDIETSEDGEIA | |
| | WNKQTDFKIVRKVLSYPQVNIVKKTEVQTHGLDRGKPRGLFNANPSPKPKPDSSENLVGVKRNLDPKKYGGYAGISNSYAVLVKAIIEKGVKKKETMVLEFQGISILDRITFEKDKRAF | |
| | LLGKGYKDIKKIIELPKYSLFELKDGSRRMLASILSTNNKRGEIHKGNELFVPQKFTTLLYHAKRINNPINKDHIEYVKKHRDDFKELLNYVLEFNEKYVGATKNGERLKEAVADFDSK | |
| | SNEEICTSFLGAVNSKNAGLFELTSLGSASDFEFLGVKIPRYRDYTPSSLLKDSTLIHQSITGLYETRIDLSKLGED | |
| 341 | MQKNYTIGLDIGTNSVGWAVMKDDYTLIRKRMKVLGNTDIKKIKKNFWGVRLFDEGETAKETRLKRGTRRRYQRRRNRLIYLQDIFQQPMLAIDENFFHRLDDSFFVPDDKSYDRHPIF | WP_004636532.1 |
| | GSLEEEVAYHNTYPTIYHLRKHLADNPEKADLRLVYTALAHIVKYRGHFLIEGELNTENTSISETFEQFLDTYSDIFKEQLVGDISKVEEILSSKQSRSRKHEQIMALFPNENKLGNFG | [Dolosigranulum |
| | RFMMLIVGNTSNFKPVFDLDDEYKLKLSDETYEEDLDTLLGMTDDVFLDVFMAAKNVYDAVEMSAIISTDTGNSKAVLSNQMINFYDEHKVDLAQLKQFFKTHLPDKYYECFSDPSKNG | pigrum] |
| | YAGYIDGKTNQEDFYKYIEKVMKTIKSDKKDYFLDKIDREVFLRKQRSFYNSVIPHQIHLQEMQAILDRQSQYYPFLAENRDKIESLVTFRIPYYVGPLTVSDQSEFAWMERQSDEPIR | |
| | PWNFDEIVNKERSAEKFIERMTNMDTYLLEEKVLPKRSLLYQTFEVYNELTKVRYTNEQGKTEKLNRQQKAEIIETLFKQKNRVREKDIANYLEQYGYVDGTDIKGVEDKFNASLSTYN | |
| | DLAKIDGAKAYLDDPEYADVWEDIIKILTIFEDKAMRKKQLQTYSDTLSPEILKKLERKHYTGWGRFSKKLINGLRDEGSNKTILDYLKSDEGSSGPTNRNFMQLIRDNTLSFKKKIED | |
| | AQTIEDTTHIYDTVAELPGSPAIKKGIRQALKIVEEIIDIIGYEPENIVVEMARESQTTKKGKDLSKERLEKLTEAIKEFDGPSDVKVKDLKNENLRNDRLYLYYLQNGRDMYTNEPLD | |
| | INNLSKYDIDHIIPQSFTTDNSIDNKVLVSRTKNQGNKSDDVPSINIVHKMKPFWRQLHKAGLISDRKFKNLTKAEHGGLTEADRAHFLNRQLVETRQITKHVANLLDSQYNTAEEQRI | |
| | NIVLLKSSMTSRFRKEFKLYKVREINDYHHGHDAYLNAVVATTIMKVYPNLKPQFVYGQYKKTSMFKEEKATARKHFYSNITKFFKKEKVVNEETGEILWDTERHLSTIKRVLSWKQMN | |
| | IVKKVEKQKGQLWKETIYPKGDSSKLIPVKEGMDPQKYGGLSQVSEAFAVVITHEKGKKKQLKSDLISIPIVDQKAYEQHPTAYLEEAGYNNPTVLHELFKYQLFELEDGSRRMIASAK | |
| | EFQKGNQMVLPLELVELLYHANRYDKVKFPDSIEYVHDNLAKFDDLLEYVIDFSNKYINADKNVQKIQKIYKEHGTEDVELTVESFVNLMTFTAMGAPATFKFYGESITRSRYTSITEF | |
| | RGSTLIFQSITGLYETRYKLEDN | |
| 342 | MRKPYSIGLDIGTNSVGWAVITDDYKVPSKKMRIQGTTDRTSIKKNLIGALLFDNGETAEATRLKRTTRRRYTRRKYRIKELQKIFSSEMNELDIAFFPRLSESFLVSDDKEFENHPIF | WP_003099269.1 |
| | GNLKDEITYHNDYPTIYHLRQTLADSDQKADLRLIYLALAHIIKFRGHFLIEGNLDSENTDVHVLFLNLVNIYNNLFEEDIVETASIDAEKILTSKTSKSRRLENLIAEIPNQKRNMLF | [Streptococcus |
| | GNLVSLALGLTPNFKTNFELLEDAKLQISKDSYEEDLDNLLAQIGDQYADLFIAAKKLSDAILLSDIITVKGASTKAPLSASMVQRYEEHQQDLALLKNLVKKQIPEKYKEIFDNKEKN | iniae] |
| | GYAGYIDGKTSQEEFYKYIKPILLKLDGTEKLISKLEREDFLRKQRTFDNGSIPHQIHLNELKAIIRRQEKFYPFLKENQKKIEKLFTFKIPYYVGPLANGQSSFAWLKRQSNESITPW | |
| | NFEEVVDQEASARAFIERMTNFDTYLPEEKVLPKHSPLYEMFMVYNELTKVKYQTEGMKRPVFLSSEDKEEIVNLLFKKERKVTVKQLKEEYFSKMKCFHTVTILGVEDRFNASLGTYH | |
| | DLLKIFKDKAFLDDEANQDILEEIVWTLTLFEDQAMIERRLVKYADVFEKSVLKKLKKRHYTGWGRLSQKLINGIKDKQTGKTILGFLKDDGVANRNFMQLINDSSLDFAKIIKNEQEK | |
| | TIKNESLEETIANLAGSPAIKKGILQSIKIVDEIVKIMGQNPDNIVIEMARENQSTMQGIKNSRQRLRKLEEVHKNTGSKILKEYNVSNTQLQSDRLYLYLLQDGKDMYTGKELDYDNL | |
| | SQYDIDHIIPQSFIKDNSIDNTVLTTQASNRGKSDNVPNIETVNKMKSFWYKQLKSGAISQRKFDHLTKAERGALSDFDKAGFIKRQLVETRQITKHVAQILDSRFNSNLTEDSKSNRN | |
| | VKIITLKSKMVSDFRKDFGFYKLREVNDYHHAQDAYLNAVVGTALLKKYPKLEAEFVYGDYKHYDLAKLMIQPDSSLGKATTRMFFYSNLMNFFKKEIKLADDTIFTRPQIEVNTETGE | |
| | IVWDKVKDMQTIRKVMSYPQVNIVMKTEVQTGGFSKESIWPKGDSDKLIARKKSWDPKKYGGFDSPIIAYSVLVVAKIAKGKTQKLKTIKELVGIKIMEQDEFEKDPIAFLEKKGYQDI | |
| | QTSSIIKLPKYSLFELENGRKRLLASAKELQKGNELALPNKYVKFLYLASHYTKFTGKEEDREKKRSYVESHLYYFDEIMQIIVEYSNRYILADSNLIKIQNLYKEKDNFSIEEQAINM | |
| | LNLFTFTDLGAPSAFKFFNGDIDRKRYSSTNEIINSTLIYQSPTGLYETRIDLSKLGGK | |
| 343 | MRKPYTIGLDIGTNSVGWAVLTDQYNLVKRKMKVAGSAEKKQIKKNFWGVRLFDEGEVAAGRRMNRTTRRRIERRRNRIAYLQEIFAAEMAEVDANFFYRLEDSFYIESEKRHSRHPFF | WP_038409211.1 |
| | ATIEEEVAYHEEYKTIYHLREKLVNSSDKADLRLVYLALAHIIKYRGNFLIEGMLDTKNTSVDEVFKQFIQTYNQIFASDIEEGSLTRLEENKEVAEILSEKLTRREKLDKILKLYTGE | [Listeria |
| | KSTGMFARFINLIIGSKGDFKKVFDLDEKAEIECAKDTYEEDLEALLAKIGDEYAEIFVAAKSTYNAVVLSNIITVTDTETKAKLSASMIERFDKHAKDLKRLKAFFKMQLPEKFNEVF | ivanovii |
| | NDIEKDGYAGYIDGKTTQEKFYKYMKKMLANIDGADYFIDQIEEENFLRKQRTFDNGTIPHQLHLEELEAILHQQAKYYPFLRKDYEKIRSLVTFRIPYFIGPLANGQSDFAWLTRKAD | |
| | GEIRPWNIEEKVDFGKSAIDFIEKMTNKDTYLPKENVLPKHSLCYQKYMVYNELTKIRYIDDQGKTHHFSGQEKQQIFNGLFKQQRKVKKKDLERFLYTINHIESPTIEGVEDAFNSSF | |
| | ATYHDLQKGGVTQEILDNPLNADMLEEIVKILTVFEDKRMIKEQLQSFSDVLDGTILKKLERRHYTGWGRLSAKLLTGIRDKHSHLTILDYLMNDDGLNRNLMQLINDSNLSFKSIIEK | |
| | EQVSTADKGIQSIVAELAGSPAIKKGILQSLKIVDELVGIMGYPPQTIVVEMARENQTTGKGKNNSKPRFISLEKAIKEFGSQILKEHPTDNQCLKNDRLYLYYLQNGKDMYTGKELDI | |
| | HNLSNYDIDHIIPQSFITDNSIDNRVLVSSTANREKGDNVPLLEVVRKRKAFWEKLYQAKLMSKRKFDYLTKAERGGLTEADKANFIQRQLVETRQITKNVANILYQRFNCKQDENGNE | |
| | VEQVRIVTLKSTLVSQFRKQFQLYKVREVNDYHHAHDAYLNGVVANTLLKVYPQLEPEFVYGDYHQFDWFKANKATAKKQFYTNIMRFFAKENQIIDKNGEILWDNRYLDTIKKVLSYR | |
| | QMNIVKKTEIQKGEFSNATVNPKGNSSKLISRKADWNPIKYGGFDGSNMAYSIVIEYEKRKKKTVIKKELIQINIMERVAFEKDQKAFLEEKGYYSPKVLTKIPKYTLYECENGRRRML | |
| | GSANEAQKGNQMVLPNHLMTLLYHAKNCEANDGESLAYIEMHREMFAELLAYISEFAKRYTLANDRLEKINMFFEQNKKGDIKVIAKSFDKLKVFNAFGAPRDFEFFETTIKRKRYYNI | |
| | KELLNATIIYQSITGLYEARKRLED | |
| 344 | MRLFEEGHTAEDRRLKRTARRRISRRRNRLRYLQAFFEEAMTDLDENFFARLQESFLVPEDKKWHRHPIFAKLEDEVAYHETYPTIYHLRKKLADSSEQADLRLIYLALAHIVKYRGHF | WP_016631044.1 |
| | LIEGKLSTENTSVKDQFQQFMVIYNQTFVNGESRLVSAPLPESVLIEEELTEKASRTKKSEKVLQQFPQEKANGLFGQFLKLMVGNKADFKKVFGLEEEAKITYASESYEEDLEGILAK | [Enterococcus- |
| | VGDEYSDVFLAAKNVYDAVELSTILADSDKKSHAKLSSSMIVRFTEHQEDLKKFKRFIRENCPDEYDNLFKNEQKDGYAGYIAHAGKVSQLKFYQYVKKIIQDIAGAEYFLEKIAQENF | multispecies] |
| | LRKQRTFDNGVIPHQIHLAELQAIIHRQAAYYPFLKENQEKIEQLVTFRIPYYVGPLSKGDASTFAWLKRQSEEPIRPWNLQETVDLDQSATAFIERMTNFDTYLPSEKVLPKHSLLYE | |
| | KFMVFNELTKISYTDDRGIKANFSGKEKEKIFDYLFKTRRKVKKKDITQFYRNEYNTEIVTLSGLEEDQFNASFSTYQDLLKCGLTRAELDHPDNAEKLEDIIKILTIFEDRQRIRTQL | |
| | STFKGQFSAEVLKKLERKHYTGWGRLSKKLINGIYDKESGKTILDYLVKDDGVSKHYNRNFMQLINDSQLSFKNAIQKAQSSEHEETLSETVNELAGSPAIKKGIYQSLKIVDELVAIM | |
| | GYAPKRIVVEMARENQTTSTGKRRSIQRLKIVEKAMAEIGSNLLKEQPTTNEQLRDTRLFLYYMQNGKDMYTGDELSLHRLSHYDIDHIIPQSFMKDDSLDNLVLVGSTENRGKSDDVP | |
| | SKEVVKDMKAYWEKLYAAGLISQRKFQRLTKGEQGGLTLEDKAHFIQRQLVETRQITKNVAGILDQRYNAKSKEKKVQIITLKASLTSQFRSIFGLYKVREVNDYHHGQDAYLNCVVAT | |
| | TLLKVYPNLAPEFVYGEYPKFQTFKENKATAKAIIYTNLLRFFTEDEPRFTKDGEILWSNSYLKTIKKELNYHQMNIVKKVEVQKGGFSKESIKPKGPSNKLIPVKNGLDPQKYGGFDS | |
| | PVVAYTVLFTHEKGKKPLIKQEILGITIMEKTRFEQNPILFLEEKGFLRPRVLMKLPKYTLYEFPEGRRRLLASAKEAQKGNQMVLPEHLLTLLYHAKQCLLPNQSESLAYVEQHQPEF | |
| | QEILERVVDFAEVHTLAKSKVQQIVKLFEANQTADVKEIAASFIQLMQFNAMGAPSTFKFFQKDIERARYTSIKEIFDATIIYQSPTGLYETRRKVVD | |
| 345 | MSNKSYSIGLDIGTNSVGWAVITDDYKVPSKKMKVLGNTDKHFIKKNLIGALLFDEGTTAEDRRLKRTARRRYTRRKNRLRYLQEIFSQEISKVDSSFFHRLDDFFLVPEDKRGSKYPI | WP_000066813.1 |
| | FATLVEEKEYHKKFPTIYHLRKHLADSKEKTDLRLIYLALAHMIKYRGHFLYEESFDIKNNDIQKIFSEFISIYDNTFEGKSLSGQNAQVEAIFTDKISKSTKRERVLKLFPDEKSTGL | [Streptococcus |
| | FSEFLKLIVGNQADFKKHFDLEEKAPLQFSKDTYDEDLENLLGQIGDDFADLFLVAKKLYDAILLSGILTVKDLSTKAPLSASMIERYENHQKDLAALKQFIQNNLQEKYDEVFSDQSK | sp. M334] |
| | DGYAGYIDGKTTQEAFYKYIKNLLSKFEGADYFLDKIEREDFLKKQRTFDNGSIPHQIHLQEMNAIIRRQGEHYPFLQENKEKIEKILTFRIPYYVGPLARGNGDFAWLTRNSDQAIRP | |
| | WNFEEIVDQASSAEDFINKMTNYDLYLPEEKVLPKHSLLYETFAVYNELTKVKFIAEGLTRYQFLDKKQKKDIFDTFFKAENKRKVTEKDIIHYLHNVDGYDGIELKGIEKQFNASLST | |
| | YHDLLKIIKDKAFMDDSKNEEILENIIHTLTIFEDREMIKQRLAQYDSLFDEKVIKALTRRHYTGWGKLSAKLINGIRDKKSGKTILDYLIDDGEINRNFMQLIHDDGLSFKEIIQKAQ | |
| | VFGKTNDVKQVVQELPGSPAIKKGILQSIKIVDELVKVMGHAPESIVIEMARENQTTARGKKNSQQRYKRIEDSLKNLASGLDSNILKENPTDNIQLQNDRLFLYYLQNGRDMYTGKPL | |
| | EINQLSNYDIDHIIPQAFIKDDSLDNRVLTSSKDNRGKSDNVPSLEVVEKMKAFWQQLLDSKLISERKFNNLTKAERERGGLNELDKVGFIKRQLVETRQITKHVAQFLDARFNKEVTE | |
| | KDKKNRNVKIITLKSNLVSNFRKEFGLYKVREINDYHHAHDAYLNAVLAKAILKKYPKLEPEFVYGDYQKYDLQRYISKSREPKEVEKATQKYFFYSNLLNFFKEEVHYADGTIVKREN | |
| | IEYSKDTGEIAWNKEKDFATVKKVLSLPQVNIVKKTEVQTGGFSKESILPKGNSDKLIPRKTKEILWDTTKYGGFDSPVIAYSILLIADIEKGKAKKLKTVKTLVGITIMEKATFEKNP | |
| | ITFLENKGYHNVRKENILCLPKYSLFELESGRRRMLASAKELQKGNEIVLPVYLTTLLYHSKNVHKLDEPEHLEYIQKHRYEFKDLLNLVSEFSQKYVLADANLEKIKNLYADNEQADI | |
| | EILANSFINLLTFTALGAPAAFKFLGKDVDRKRYTTVSEILNATLIHQSITGLYETRIDLSKLGED | |
| 346 | MSQNNNKIYNIGLDIGDASVGWAVVDEHYNLLKRHGKHMWGSRLFTQANTAVERRSSRSTRRRYNKRRERIRLLREIMEDMVLDVDPTFFIRLANVSFLDQEDKKDYLKENYHSNYNLF | WP_031589969.1 |
| | IDKDFNDKTYYDKYPTIYHLRKHLCESKEKEDPRLIYLALHHIVKYRGNFLYEGQKFSMDVSNIEDKMIDVLRQFNEINLFEYVEDRKKIDEVLNVLKEPLSKKHKAEKAFALFDTTKD | [Kandleria |
| | NKAAYKELCAALAGNKFNVTKMLKEAELHDEDEKDISFKFSDATFDDAFVEKQPLLGDCVEFIDLLHDIYSWVELQNILGSAHTSEPSISAAMIQRYEDHKNDLKLLKDVIRKYLPKKY | vitulina] |
| | FEVFRDEKSKKNNYCNYINHPSKTPVDEFYKYIKKLIEKIDDPDVKTILNKIELESFMLKQNSRTNGAVPYQMQLDELNKILENQSVYYSDLKDNEDKIRSILTFRIPYYFGPLNITKD | |
| | RQFDWIIKKEGKENERILPWNANEIVDVDKTADEFIKRMRNFCTYFPDEPVMAKNSLTVSKYEVLNEINKLRINDHLIKRDMKDKMLHTLFMDHKSISANAMKKWLVKNQYFSNTDDIK | |
| | IEGFQKENACSTSLTPWIDFTKIFGKINESNYDFIEKIIYDVTVFEDKKILRRRLKKEYDLDEEKIKKILKLKYSGWSRLSKKLLSGIKTKYKDSTRTPETVLEVMERTNMNLMQVIND | |
| | EKLGFKKTIDDANSTSVSGKFSYAEVQELAGSPAIKRGIWQALLIVDEIKKIMKHEPAHVYIEFARNEDEKERKDSFVNQMLKLYKDYDFEDETEKEANKHLKGEDAKSKIRSERLKLY | |
| | YTQMGKCMYTGKSLDIDRLDTYQVDHIVPQSLLKDDSIDNKVLVLSSENQRKLDDLVIPSSIRNKMYGFWEKLFNNKIISPKKFYSLIKTEFNEKDQERFINRQIVETRQITKHVAQII | |
| | DNHYENTKVVTVRADLSHQFRERYHIYKNRDINDFHHAHDAYIATILGTYIGHRFESLDAKYIYGEYKRIFRNQKNKGKEMKKNNDGFILNSMRNIYADKDTGEIVWDPNYIDRIKKCF | |
| | YYKDCFVTKKLEENNGTFFNVTVLPNDTNSDKDNTLATVPVNKYRSNVNKYGGFSGVNSFIVAIKGKKKKGKKVIEVNKLTGIPLMYKNADEEIKINYLKQAEDLEEVQIGKEILKNQL | |
| | IEKDGGLYYIVAPTEIINAKQLILNESQTKLVCEIYKAMKYKNYDNLDSEKIIDLYRLLINKMELYYPEYRKQLVKKFEDRYEQLKVISIEEKCNIIKQILATLHCNSSIGKIMYSDFK | |
| | ISTTIGRLNGRTISLDDISFIAESPTGMYSKKYKL | |
| 347 | MSQNNNKIYNIGLDIGDASVGWAVVDEHYNLLKRHGKHMWGSRLFTQANTAVERRSSRSTRRRYNKRRERIRLLRGIMEDMVLDVDPTFFIRLANVSFLDQEDKKDYLKENYHSNYNLF | WP_029073316.1 |
| | IDKDFNDKTYYDKYPTIYHLRKHLCESKEKEDPRLIYLALHHIVKYRGNFLYEGQKFSMDVSNIEDKMIDVLRQFNEINLFEYVEDRKKIDEVLNVLKEPLSKKHKADKAFALFDTTKD | [Kandleria |
| | NKAAYKELCAALAGNKFNVTKMLKEAELHDEDEKDISFKFSDATFDDAFVEKQPLLGDCVEFIDLLHDIYSWVELQNILGSAHTSEPSISAAMIQRYEDHKNDLKLLKDVIRKYLPKKY | vitulina] |
| | FEVFRDEKSKKNNYCNYINHPSKTPVDEFYKYIKKLIEKIDDPDVKTILNKIELESFMLKQNSRTNGAVPYQMQLDELNKILENQSVYYSDLKDNEDKIRSILTFRIPYYFGPLNITKD | |
| | RQFDWIIKKEGKENERILPWNANEIVDVDKTADEFIKRMRNFCTYFPDEPVLAKNSLTVSKYEVLNEINKLRINDHLIKRDIKDKMLHTLFMDHKSISANAMKKWLVKNQYFSNTDDIK | |
| | IEGFQKENACSTSLTPWIDFTKIFGEINNSNYELIEKIIYDVTVFEDKKILRRRLKKEYDLDEEKIKKILKLKYSGWSRLSKKLLSGIKTKYKDSTRTPETVLEVMERTNMNLMQVIND | |
| | EKLGFKKTIDDANSTSVSGKFSYAEVQELAGSPAIKRGIWQALLIVDEIKKIMKHEPAHVYIEFARNEDEKERKDSFVNQMLKLYKDYDFEDETEKEANKHLKGEDAKSKIRSERLKLY | |
| | YTQMGKCMYTGKSLDIDRLDTYQVDHIVPQSLLKDDSIDNKVLVLSSENQRKLDDLVIPEMIRNKMFGFWNKLYENKIISPKKFYSLIKSEYSDKDKERFINRQIVETRQITKHVAQII | |
| | SNHYETTKVVTVRADLSHAFRERYHIYKNRDINDFHHAHDAYIATILGTYIGHRFESLDAKYIYGEYQKIFRNNKNKDKEFNKNKDGFILNSMRNLYADKDTGEVVWDPEWISRIKKCF | |
| | YYKDCFVTKKLEENNGSFFNLTVRPNDEHSEKGTTIAKVPVNKLRSNVHKYGGFEGLKYSIVAIKGKKKKGKKIIDVNKLVGIPLMYKNVDDETKINYIKESEGLEEVKIIKEILKNQL | |
| | IEINGGLFYVTSPTEIVNARQLILDFNCTRIIDGIYKAMKYKNYSELSQEEIMNVYDIFVEKLKLYYPTYKNIATNFENMREQFENISDEEKCEVIRQMLVVMHAGPQNGNITFDDFKL | |
| | SNRLGRLNCKTISLDTTVFIADSPTGMYSKKYKL | |
| 348 | MSRPYNIGLDIGTSSIGWSVVDDQSKLVSVRGKYGYGVRLYDEGQTAAERRSFRTTRRRLKRRKWRLGLLREIFEPYITPVDDTFFLRKKQSNLSPKDQRKLYPQTSLFNDRTDRAFYD | WP_039099354.1 |
| | DYPTIYHLRYKLMTEKRQFDIREIYLAMHHIVKYRGHFLNEAPVSSFKSSEINLVAHFDRLNTIFADLFSESGFQLETDKLAEVKALLLDNHQSASNRQRQALLLIYTPSTNKAVEKQN | [Lactobacillus |
| | KAIATELLKAILGLKAKFNVLTGIEAEDVKTWTLTFNAENFDEEMVKLESSLDDNAHQIIESLQELYSGVLLAGIVPENQSLSQAMITKYDDHQKHLKMLKAVREALAPEDRQRLKQAY | curvatus] |
| | DQYVDGQENTKAYSKEDFYGDITKALKNNPDHPIVSEIKKLIELDQFMPKQRTKDNGAIPHQLHQQELDRIIENQQQYYPWLAELNPNSKRQTVAKYKLDELVAFRVPYYVGPLITAEQ | |
| | QQQSSDAKFAWMIRKAEGQITPWNFDDKVDRQASANEFIKRMTTTDTYLLAEDVLPKQSLIYQRFEVLNELNGLKIDDQPITTELKQAIFTDLFMQKTSVTVKNIQDYLVSEKRYASRP | |
| | AITGLSDENKFNSRLSTYHDLKTIVGDAVDDVDKQADLEKCIEWSTIFEDGKIYSAKLNEIDWLTDQQRVQLAAKRYRGWGRLSAKLLTQIVNANGQRIMDLLWDTTDNFMRIVHSEDF | |
| | DKLITEANQMMLAENDVQDVINDLYTSPQNKKALRQILLVVNDIQKAMKGQAPERILIEFAREDEVNPRLSVQRKRQVEQVYQNISNELLNNTEIRNELKDLSNSALSNTRLFLYFMQG | |
| | GRDMYTGDSLNIDRLSTYDIDHILPQSFIKDNSLDNRVLVSQRMNRSKADQVPTDFTSVELGQKMQIQWEQMLRAGLITKKKYDNLTLNPDHISKYAMKGFINRQLVETRQVIKLATNL | |
| | LMEQYGEDNIELITVKSGLTHQMRTEFDFPKNRNLNNHHHAFDAYLTAFVGLYLLKRYPKLKPYFVYGEYQKASQQDKWRNFNFLNGLKKDELVDENTEAVIWNKESGLAYLNKIYQFK | |
| | KILVTREVHENSGALFNQTLYAAKDDKASGQGGKQLIPAKQDRPTALYGGYSGKTVAYMCIVRIKNKKGDLYKVCGVETSWLAQLKQLTDEDSKKAFLKQKISPQFTKVKKQKGTIVKV | |
| | VEDFEVIAPHILINQRFFDNGQELTLGSATYKHNEQELILDKTAVKLLNGALPLTQSEELAEQVYDEILDQVMHYFPLYDTNQFRAKLSAGKAAFMKLPWKSQWDGNKMVQVGQQVILD | |
| | RVLIGLHANAAVSDLGVLKISTPLGKMQQPSGISLSPDTQIIYQSPTGLFERRVALRDL | |
| 349 | MTEKNYSIGLDIGTNSVGWAVITDDYKVPAKKMKVLGNTDKKYIKKNLLGALLFDNGETAEATRLKRTARRRYTRRKNRLRYLQEIFAEEMAKVDESFFYRLDESFLTTDDKDFERHPI | WP_012962174.1 |
| | FGNKADEIKYHQEFPTIYHLRKHLADSHEKADLRLIYLALAHMIKFRGHFLIEGELNAENTDVQKLFEAFVEVYDRTFDDSNLSEITVDASSILTEKFSKSRRLENLIKHYPTEKKNTL | [Streptococcus |
| | FGNLVALALGLQPNFKTSFKLSEDAKLQFSKDTYEEDLEELIGKIGDEYADLFTSAKNLYDAILLSGILTVADNTTKAPLSASMIKRYNEHQVDLKKLKEFIKNNASDKYDEIFNDKDK | gallolyticus] |
| | NGYAGYIENGVKQDEFYKYLKTTLSKIDGSDYFLDKIEREDFLRKQRTFDNGSIPHQIHLQEMHAILRRQGEHYAFLKENQAKIEKILTFRIPYYVGPLARKNSRFAWAEYHSDEKITP | |
| | WNFDEIIDKEKSAEKFITRMTLNDLYLPEEKVLPKHSLVYETYTVYNELTKVKYVNEQGKSNFFDANMKQEIFEHVFKENRKVTKDKFLNYLNKEFPEYRIQDLIGLDKENKSFNASLG | |
| | TYHDLKKILDKSFLDDKTNETIIEDIIQTLTLFEDRDMIRQRLQKYSDIFTPQQLKKLERRHYTGWGRLSYKLINGIRNKENGKSILDYLIDDGYANRNFMQLISDDTLPFKQIIKDAQ | |
| | IIGDIDDVTSVVRELPGSPAIKKGILQSVKIVDELVKVMGHNPDNIVIEMARENQTTNRGRNQSQQRLKKLQDSLKELGSNILNEEKPSYIEGKVENNHLQDDRLFLYYIQNGKDMYTG | |
| | DELDIDHLSDYDIDHIIPQAFIKDDSIDNRVLTSSAKNRGKSDDVPSLDIVHDRKADWIRLYKSGLISKRKFDNLTKAERGGLTENDKAGFIKRQLVETRQITKHVAQILDSRFNTERD | |
| | ENDKVIRNVKVITLKSNLVSQFRKDFKFYKVREINDYHHAHDAYLNAVVGTALLKKYPKLAPEFVYGEYKKYDIRKFITSSGDKATAKYFFYSNLMNFFKRVIRYSNGKVVVRPVIECS | |
| | KDTGEIAWNKQTDFEKVRRVLSYPQVNIVKKVETQTGGFSKESILPKGNSDKLIPRKTKKFRWDTPKYGGFDSPNIAYSVFVIADVEKGKAKKLKTVKELVGISIMERSSFEENPVVFL | |
| | EKKGYQNVQEDNLIKLPKYSLFEFEGGRRRLLASASELQKGNEVVLSRHLVELLYHAHRVNSFNNSEHLKYVSEHKKEFGEVLSCVENFAKSYVDVEKNLGKIRAVADKIDTFSIEDIS | |
| | ISFVNLLTLTALGAPADFNFLGEKIPRKRYTSTKECLNATLIHQSITGLYETRIDLSKLGEE | |
| 350 | MTKDYTIGLDIGTNSVGWAVLTDDYQLMKRKMSVHGNTEKKKIKKNFWGARLFDEGQTAEFRRTKRTNRRRLARRKYRLSKLQDLFAEELCKQDDCFFVRLEESFLVPEEKQYKPASIF | WP_034700478.1 |
| | PTLEEEKEYYQKYPTIYHLRQKLVDSTEKEDLRLVYLALAHLLKYRGHFLFEGDLDTENTSIEESFRVFLEQYGKQSDQPLIVHQPVLTILTDKLSKTKKVEEILKYYPTEKINSFFAQ | [Enterococcus |
| | CLKLIVGNQANFKRIFDLEAEVKLQFSKETYEEDLESLLEKIGDEYLDIFLQAKKVHDAILLSEIISSTVKHTQAKLSSGMVERYERHKADLAKFKQFVKENVPQKATVFFKDTTKNGY | hirae] |
| | AGYIKGKTTQEEFYKFVKKELSGVVGSEPFLEKIDQETFLLKQRTYTNGVIPHQVHLIELKAIIDQQKQHYPFLEEAGPKIIALFKFRIPYYVGPLAKEQEASSFAWIERKTAEKINPW | |
| | NFSEVVDIEKSAMRFIQRMTKQDTYLPTEKVLPKNSLLYQKYMIFNELTKVSYKDERGVKQYFSGDEKQQIFKQLFQKERGKITVKKLQNFLYTHYHIENAQIFGIEKAFNASYSTYHD | |
| | FMKLAKTNQKAMQEWLEQPEMEPIFEDIVKILTIFEDRQMIKHQLSKYQEVFGEKLLKEFARKHYTGWGRFSAKLIHGIRDRKTNKTILDYLINDDDVPANRNRNLMQLINDEHLSFKE | |
| | EIAKATVFSKHKSLVDVIQDLPGSPAIKKGIWQSLKIVEELIAIIGYKPKNIVIEMARENQKTHRTKPRLKALENGLKQIGSTLLKEQPTDNKALQKERLYLYYLQNGRDMYTGEPLEI | |
| | ENLHQYEVDHIIPRSFIVDNSIDNKVLVASKQNQKKRDDVPNKQIVNEQRIFWNQLKEAKLISPKKYAYLTKIELTPEDKARFIQRQLVETRQITKHVANILHQSFNQEEEGTDCDGVQ | |
| | IITLKATLTSQFRQTFGLYKVREINPHHHAHDAYLNGFIANVLLKRYPKLAPEFVYGKYVKYSLARENKATAKKEFYSNILKFLESDEPFCDENGEIYWEKSHHLPRIKKVLSSHQVNV | |
| | VKKVEQQKGGFYKETVNSKEKPDKLIERKNNWDVTKYGGFGSPVIAYAIAFVYAKGKTQKKTRAIEGITIMEQAAFEKDPTTFLKDKGFPHVTEFIKLPKYTLFEFDNGRRRFLASHKE | |
| | SQKGNPFILSDQLVTLLYHAQHYDKITYQESFDYVNTHLSDFSAILTEVLAFAEKYTLADKNIERIQELYEENKYGEISMIAQSFLQLLQFNAIGAPADFKFFGVTIPRKRYTSLTEIW | |
| | DATIIYQSVTGLYETRIRMGDLWAGEQ | |
| 351 | MTKDYTIGLDIGTNSVGWAVLTDDYQLMKRKMSVHGNTEKKKIKKNFWGARLFDEGQTAEFRRTKRTNRRRLARRKYRLSKLQDLFAEELCKQDDCFFVRLEESFLVPEEKQYKPASIF | WP_034867970.1 |
| | PTLEEEKEYYQKYPTIYHLRQKLVDSTEKEDLRLVYLALAHLLKYRGHFLFEGDLDTENTSIEESFRVFLEQYSKQSDQPLIVHQPVLTILTDKLSKTKKVEEILKYYPTEKINSFFAQ | [Enterococcus |
| | CLKLIVGNQANFKRIFDLEAEVKLQFSKETYEEDLESLLEKIGDEYLDIFLQAKKVHDAILLSEIISSTVKHTKAKLSSGMVERYERHKADLAKFKQFVKENVPQKATVFFKDTTKNGY | faecium] |
| | AGYIKGKTTQEEFYKFVKKELSGVVGSEPFLEKIDQETFLLKQRTYTNGVIPHQVHLIELKAIIDQQKQHYPFLEEAGPKIIALFKFRIPYYVGPLAKEQEASSFAWIERKTAEKINPW | |
| | NFSEVVDIEKSAMRFIQRMTKQDTYLPTEKVLPKNSLLYQKYMIFNELTKVSYKDERGVKQYFSGDEKQQIFKQLFQKERGKITVKKLQNFLYTHYHIENAQIFGIEKAFNASYSTYHD | |
| | FMKLAKTNQKAMQEWLEQPEMEPIFEDIVKILTIFEDRQMIKHQLSKYQEVFGEKLLKEFARKHYTGWGRFSAKLIHGIRDRKTNKTILDYLINDDDVPANRNRNLMQLINDEHLSFKE | |
| | EIAKATVFSKHKSLVDVIQDLPGSPAIKKGIWQSLKIVEELIAIIGYKPKNIVIEMARENQKTHRTSPRLKALENGLKQIGSTLLKEQPTDNKALQKERLYLYYLQNGRDMYTGEPLEI | |
| | ENLHQYEVDHIIPRSFIVDNSIDDKVLVASKQNQKKRDDVPKKQIVNEQRIFWNQLKEAKLISTKKYAYLTKIELTPEDKARFIQRQLVETRQITKHVANILHQSFNQEEEGTDCDGVQ | |
| | IITLKATLTSQFRQTFGLYKVREINPHHHAHDAYLNGFIANVLLKRYPKLAPEFVYGKYVKYSLARENKATAKKEFYSNILKFLESDEPFCDENGEIYWEKSHHLPRIKKVLSSHQVNV | |
| | VKKVEQQKGGFYKETVNSKEKPDKLIERKNNWDVTKYGGFGSPVIAYAIAFVYAKGKTQKKTRAIEGITIMEQAAFEKDPTTFLKEKGFPQVTEFIKLPKYTLFEFDNGRRRFLASHKE | |
| | SQKGNPFILSDQLVTLLYHAQHYDKITYQESFDYVNTHLSDFSAILTEVLAFAEKYTLADKNIERIQELYEENKYGETSMIAQSFLQLLQFNAIGAPADFKFFGVTIPRKRYTSLTEIW | |
| | DATIIYQSVTGLYETRIRMGDLWAGEQ | |
| 352 | MTKDYTIGLDIGTNSVGWAVLTDDYQLMKRKMSVHGNTEKKKIKKNFWGARLFDEGQTAEFRRTKRTNRRRLARRKYRLSKLQDLFAEELCKQDDCFFVRLEESFLVPEEKQYKPASIF | WP_010737004.1 |
| | PTLEEEKEYYQKYPTIYHLRQKLVDSTEKEDLRLVYLALAHLLKYRGHFLFEGDLDTENTSIEESFRVFLEQYSKQSDQPLIVHQPVLTILTDKLSKTKKVEEILKYYPTEKINSFFAQ | [Enterococcus |
| | CLKLIVGNQANFKRIFDLEAEVKLQFSKETYEEDLESLLEKIGDEYLDIFLQAKKVHDAILLSEIISSTVKHTKAKLSSGMVERYERHKADLAKFKQFVKENVPQKATVFFKDTTKNGY | hirae] |
| | AGYIKGKTTQEEFYKFVKKELSGVVGSEPFLEKIDQETFLLKQRTYTNGVIPHQVHLIELKAIIDQQKQHYPFLEEAGPKIIALFKFRIPYYVGPLAKEQEASSFAWIERKTAEKINPW | |
| | NFSEVVDIEKSAMRFIQRMTKQDTYLPTEKVLPKNSLLYQKYMIFNELTKVSYKDERGVKQYFSGDEKQQIFKQLFQKERGKITVKKLQNFLYTHYHIENAQIFGIEKAFNASYSTYHD | |
| | FMKLAKTNQKAMQEWLEQPEMEPIFEDIVKILTIFEDRQMIKHQLSKYQEVFGEKLLKEFARKHYTGWGRFSAKLIHGIRDRKTNKTILDYLINDDDVPANRNRNLMQLINDEHLSFKE | |
| | EIAKATVFSKHKSLVDVIQDLPGSPAIKKGIWQSLKIVEELIAIIGYKPKNIVIEMARENQKTHRTSPRLKALENGLKQIGSTLLKEQPTDNKALQKERLYLYYLQNGRDMYTGEPLEI | |
| | ENLHQYEVDHIIPRSFIVDNSIDNKVLVASKQNQKKRDDVPKKQIVNEQRIFWNQLKEAKLISPKKYAYLTKIELTPEDKARFIQRQLVETRQITKHVANILHQSFNQEEEGTDCDGVQ | |
| | IITLKATLTSQFRQTFGLYKVREINPHHHAHDAYLNGFIANVLLKRYPKLAPEFVYGKYVKYSLARENKATAKKEFYSNILKFLESDEPFCDENGEIYWEKSHHLPRIKKVLSSHQVNV | |
| | VKKVEQQKGGFYKETVNSKEKPDKLIERKNNWDVTKYGGFGSPVIAYAIAFVYAKGKTQKKTRAIEGITIMEQAAFEKDPTTFLKEKGFPQVTEFIKLPKYTLFEFDNGRRRFLASHKE | |
| | SQKGNPFILSDQLVTLLYHAQHYDKITYQESFDYVNTHLSDFSAILTEVLAFAEKYTLADKNIERIQELYEENKYGETSMIAQSFLQLLQFNAIGAPADFKFFGVTIPRKRYTSLTEIW | |
| | DATIIYQSVTGLYETRIRMGDLWAGEQ | |
| 353 | MTKDYTIGLDIGTNSVGWAVLTDDYQLMKRKMSVHGNTEKKKIKKNFWGARLFDEGQTAEFRRTKRTNRRRLARRKYRLSKLQDLFAEELCKQDDCFFVRLEESFLVPEEKQYKPASIF | WP_010720994.1 |
| | PTLEEEKEYYQKYPTIYHLRQKLVDSTEKGDLRLVYLALAHLLKYRGHFLFEGDLDTENTSIEESFRVFLEQYGKQSDQPLIVHQPVLTILTDKLSKTKKVEEILKYYPTEKINSFFAQ | [Enterococcus |
| | CLKLIVGNQANFKRIFDLEAEVKLQFSKETYEEDLESLLEKIGDEYLDIFLQAKKVHDAILLSEIISSTVKHTQAKLSSGMVERYERHKADLAKFKQFVKENVPQKATVFFKDTTKNGY | hirae] |
| | AGYIKGKTTQEEFYKFVKKELSGVVGSEPFLEKIDQETFLLKQRTYTNGVIPHQVHLIELKAIIDQQKQHYPFLEEAGPKIIALFKFRIPYYVGPLAKEQEASSFAWIERKTAEKINPW | |
| | NFSEVVDIEKSAMRFIQRMTKQDTYLPTEKVLPKNSLFYQKYMIFNELTKVSYKDERGVKQYFSGDEKQQIFKQLFQKERGKITVKKLQNFLYTHYHIENAQIFGIEKAFNASYSTYHD | |
| | FMKLAKTNQKAMQEWLEQPEMEPIFEDIVKILTIFEDRQMIKHQLSKYQEVFGEKLLKEFARKHYTGWGRFSAKLIHGIRDRKTNKTILDYLINDDDVPANRNRNLMQLINDEHLSFKE | |
| | EIAKATVFSKHKSLVDVIQDLPGSPAIKKGIWQSLKIVEELIAIIGYKPKNIVIEMARENQKTHRTKPRLKALENGLKQIGSTLLKEQPTDNKALQKERLYLYYLQNGRDMYTGEPLEI | |
| | ENLHQYEVDHIIPRSFIVDNSIDNKVLVASKQNQKKRDDVPKKQIVNEQRIFWNQLKEAKLISPKKYAYLTKIELTPEDKARFIQRQLVETRQITKHVANILHQSFNQEEEGTDCDGVQ | |
| | IITLKATLTSQFRQTFGLYKVREINPHHHAHDAYLNGFIANVLLKRYPKLAPEFVYGKYVKYSLARENKATAKKEFYSNILKFLESDEPFCDENGEIYWEKSHHLPRIKKVLSSHQVNV | |
| | VKKVEQQKGGFYKETVNSKEKPDKLIERKNNWDVTKYGGFGSPVIAYAIAFVYAKGKTQKKTKAIEGITIMEQAAFEKDPTTFLKDKGFPQVTEFIKLPKYTLFEFDNGRRRFLASHKE | |
| | SQKGNPFILSDQLVTLLYHAQHYDKITYQESFDYVNTHLSDFSAILTEVLAFAEKYTLADKNIERIQELYEENKYGEISMIAQSFLQLLQFNAIGAPADFKFFGVTIPRKRYTSLTEIW | |
| | DATIIYQSVTGLYETRIRMGDLWAGEQ | |
| 354 | MTKKNYSIGLDIGTNSVGWAVITDDYKVPAKKMKVLGNTDKKYIKKNLLGALLFDSGETAEATRLKRTARRRYTRRKNRLRYLQEIFANEIAKVDESFFQRLDESFLTDDDKTFDSHPI | WP_039695303.1 |
| | FGNKAEEDAYHQKFPTIYHLRKHLADSSEKADLRLVYLALAHMIKFRGHFLIEGELNAENTDVQKIFADFVGVYNRTFDDSHLSEITVDVASILTEKISKSRRLENLIKYYPTEKKNTL | [Streptococcus |
| | FGNLIALALGLQPNFKTNFKLSEDAKLQFSKDTYEEDLEELLGKIGDDYADLFTSAKNLYDAILLSGILTVDDNSTKAPLSASMIKRYVEHHEDLEKLKEFIKANKSELYHDIFKDKNK | gallolyticus] |
| | NGYAGYIENGVKQDEFYKYLKNILSKIKIDGSDYFLDKIEREDFLRKQRTFDNGSIPHQIHLQEMHAILRRQGDYYPFLKEKQDRIEKILTFRIPYYVGPLVRKDSRFAWAEYRSDEKI | |
| | TPWNFDKVIDKEKSAEKFITRMTLNDLYLPEEKVLPKHSHVYETYAVYNELTKIKYVNEQGKESFFDSNMKQEIFDHVFKENRKVTKEKLLNYLNKEFPEYRIKDLIGLDKENKSFNAS | |
| | LGTYHDLKKILDKAFLDDKVNEEVIEDIIKTLTLFEDKDMIHERLQKYSDIFTANQLKKLERRHYTGWGRLSYKLINGIRNKENNKTILDYLIDDGSANRNFMQLINDDTLPFKQIIQK | |
| | SQVVGDVDDIEAVVHDLPGSPAIKKGILQSVKIVDELVKVMGGNPDNIVIEMARENQTTNRGRSQSQQRLKKLQNSLKELGSNILNEEKPSYIEDKVENSHLQNDQLFLYYIQNGKDMY | |
| | TGDELDIDHLSDYDIDHIIPQAFIKDDSIDNRVLTSSAKNRGKSDDVPSLDIVRARKAEWVRLYKSGLISKRKFDNLTKAERGGLTEADKAGFIKRQLVETRQITKHVAQILDARFNTE | |
| | HDENDKVIRDVKVITLKSNLVSQFRKDFEFYKVREINDYHHAHDAYLNAVVGTALLKKYPKLASEFVYGEYKKYDIRKFITNSSDKATAKYFFYSNLMNFFKTKVKYADGTVFERPIIE | |
| | TNADGEIAWNKQIDFEKVRKVLSYPQVNIVKKVETQTGGFSKESILPKGDSDKLIPRKTKKVYWDTKKYGGFDSPTVAYSVFVVADVEKGKAKKLKTVKELVGISIMERSFFEENPVEF | |
| | LENKGYHNIREDKLIKLPKYSLFEFEGGRRRLLASASELQKGNEMVLPGYLVELLYHAHRADNFNSTEYLNYVSEHKKEFEKVLSCVEDFANLYVDVEKNLSKIRAVADSMDNFSIEEI | |
| | SNSFINLLTLTALGAPADFNFLGEKIPRKRYTSTKECLNATLIHQSITGLYETRIDLSKLGEE | |
| 355 | MTKKNYSIGLDIGTNSVGWAVITDDYKVPAKKMKVLGNTDKKYIKKNLLGALLFDSGETAEATRLKRTARRRYTRRKNRLRYLQDIFTEEMAKVDDSFFQRLDESFLTDNDKNFDSHPI | WP_018363470.1 |
| | FGNKAEEDAYHQKFPTIYHLRKHLADSTEKADLRLVYLALAHMIKFRGHFLIEGELNAENTDVQKLFTDFVGVYDRTFDDSHLSEITVDAASILTEKISKSRRLENLINNYPKEKKNTL | [Streptococcus |
| | FGNLIALALGLQPNFKTNFKLSEDAKLQFSKDTYEEDLEELLGKIGDDYADLFTSSKNLYDAILLSGILTVDDNSTKAPLSASMIKRYVEHHEDLEKLKEFIKANKSELYHDIFKDKTQ | caballi] |
| | NGYAGYIENGVKQDEFYKYLKGILTKINGSDYFLDKIEREDFLRKQRTFDNGSIPHQIHLQEMHAILRRQGDYYPFLKENQEEIEKILTFRIPYYVGPLARKDSRFAWAEYRSDEKITP | |
| | WNFDKVIDKEKSAEKFITRMTLNDLYLPEEKVLPKHSHVYETFAVYNELTKVKYVNEQGKDSFFDSNMKQEIFDHVFKENRKVTKEKLLNYLDKEFPEYRIQDLVGLDKENKSFNASLG | |
| | TYHDLKKILDKSFLDDKVNEEVIEDIIKTLTLFEDREMIQQRLQKYSDIFTKQQLKKLERRHYTGWGRLSYKLINGIRNKENNKTILDYLIDDGSANRNFMQLINDDALSFKQIIQEAQ | |
| | VVGDVDDIETVVHDLPGSPAIKKGILQSVKIVDELIKVMGDNPDNIVIEMARENQTTNRGRSQSQQRLKKLQNSLKELGSNILNEEKPSYIEDKVENSHLQNDQLFLYYIQNGKDMYTG | |
| | DELDIDHLSDYDIDHIIPQAFIKDDSIDNRVLTSSAKNRGKSDDVPSLGIVRARKAEWVRLYKSGLISKRKFDNLTKAERGGLTEADKAGFIKRQLVETRQITKHVAQILDARFNTERD | |
| | ENDKVIRDVKVITLKSNLVSQFRKEFKFYKVREINDYHHAHDAYLNAVVGTALLKKYPKLAPEFVYGEYKKYDVRKLVAKSSDDHSEMGKATAKYFFYSNLMNFFKRVIRYSNGKVIVR | |
| | PVVEYSKDTGEIAWNKRTDFEKVRKVLSYPQVNIVKKVETQTGGFSKESILPKGDSDKLIPRKTKKVLWEPKKYGGFDSPTVAYSVLVVADVEKGKTKKLKTVKELVGISIMERSFFEK | |
| | NPVEFLKNKGYQNVQEDKLMKLPKYSLFEFEGGRRRLLASATELQKGNEIMLSAHLVALLYHAHRIGNFNSAEHLKYVSEHKKEFEEVLSCVENFANVYVDVEKNLSKIRAAADSMDNF | |
| | SIEEISDSFINLLTLTALGAPADFNFLGEKIPRKRYNSTKECLNATLIHQSITGLYETRIDLSKLGEE | |
| 356 | MTKKNYSIGLDIGTNSVGWAVITDDYKVPAKKMKVLGNTDKKYIKKNLLGALLFDSGETAEATRLKRTARRRYTRRKNRLRYLQEIFAEEMTKVDESFFQRLDESFLRWDDDNKKLGRY | WP_003065552.1 |
| | PIFGNKADVVKYHQEFPTIYHLRKHLADSSEKADLRLVYLALAHMIKFRGHFLIEGELNAENTDVQKIFADFVGVYDRTFDDSHLSEITVDAASILTEKISKSRRLENLIKYYPTEKKN | [Streptococcus- |
| | TLFGNLIALALGLQPNFKMNFKLSEDAKLQFSKDSYEEDLGELLGKIGDDYADLFTSAKNLYDAILLSGILIVDDNSTKAPLSASMIKRYVEHQEDLEKLKEFIKANKSELYHDIFKDK | multispecies |
| | NKNGYAGYIENGVKQDEFYKYLKNTLSKIAGSDYFLDKIEREDFLRKQRTFDNGSIPHQIHLQEMHAILRRQGDYYPFLKENQDRIEKILTFRIPYYVGPLARKDSRFSWAEYHSDEKI | |
| | TPWNFDKVIDKEKSAEKFITRMTLNDLYLPEEKVLPKHSHVYETYAVYNELTKIKYVNEQGKDSFFDSNMKQEIFDHVFKENRKVTKEKLLNYLNKEFPEYRIKDLIGLDKENKSFNAS | |
| | LGTYHDLKKILDKAFLDDKVNEEVIEDIIKTLTLFEDKDMIHERLQKYSDIFTADQLKKLERRHYTGWGRLSYKLINGIRNKENNKTILDYLIDDGSANRNFMQLINDDTLPFKQIIQK | |
| | SQVVGDVDDIEAVVHDLPGSPAIKKGILQSVKIVDELVKVMGDNPDNIVIEMARENQTTNRGRSQSQQRLKKLQNSLKELGSNILNEEKPSYIEDKVENSHLQNDQLFLYYIQNGKDMY | |
| | TGDELDIDHLSDYDIDHIIPQAFIKDDSIDNRVLTSSAKNRGKSDDVPSLDIVRARKAEWVRLYKSGLISKRKFDNLTKAERGGLTEADKAGFIKRQLVETRQITKHVAQILDARFNTE | |
| | SDENDKVIRDVKVITLKSNLVSQFRKDFEFYKVREINDYHHAHDAYLNAVVGTALLKKYPKLASEFVYGEYKKYDIRKFITNSSDKATAKYFFYSNLMNFFKRVIRYSNGKVIVRPVVE | |
| | YSKDTEDIAWDKKSNFRTICKVLSYPQVNIVKKVETQTGGFSKESILPKGDSDKLIPRKTKKAYWDTKKYGGFDSPTVAYSVFVVADVEKGKAKKLKTVKELVGISIMERSFFEENPVE | |
| | FLENKGYHNIREDKLIKLPKYSLFEFEGGKRRLLASASELQKGNEMVIPGHLVKLLYHAQRINSFNSTKYLDYVSAHKKEFEKVLSCVEDFANLYVDVEKNLSKIRAVADSMDNFSIEE | |
| | ISNSFINLLTLTALGAPADFNFLGEKIPRKRYTSTKECLNATLIHQSITGLYETRIDLSKIGEE | |
| 357 | MTKKNYSIGLDIGTNSVGWAVITDDYKVPAKKMKVLGNTDKKYIKKNLLGALLFDSGETAEATRLKRTARRRYTRRKNRLRYLQEIFAEEMTKVDESFFYRLDESFLTTDEKDFERHPI | WP_009854540.1 |
| | FGNKAEEDAYHQKFPTIYHLRNYLADSSEKADLRLVYLALAHMIKYRGHFLIEGKLNAENTDVQKLFTDFVGVYDRTFDDSHLSEITVDVASTLTEKISKSRRLENLIKYYPTEKKNTL | [Streptococcus |
| | FGNLIALALGLQPNFKMNFKLSEDAKLQFSKDTYEEDLEELLGKIGDDYADLFTSAKNLYDAILLSGILTVDDNSTKAPLSASMIKRYVEHHEDLEKLKEFIKANKSELYHDIFKDKNK | gallolyticus] |
| | NGYAGYIENGVKQDEFYKYLKNTLSKIDGSDYFLDKIEREDFLRKQRTFDNGSIPHQIHLQEMHAILRRQGDYYPFLKEKQDRIEKILTFRIPYYVGPLVRKDSRFAWAEYRSDEKITP | |
| | WNFDKVIDKEKSAEKFITRMTLNDLYLPEEKVLPKHSHVYETYAVYNELTKIKYVNEQGKESFFDSNMKQEIFDHVFKENRKVTKEKLLNYLNKEFPEYRIKDLIGLDKENKSFNASLG | |
| | TYHDLKKILDKAFLDDKVNEEVIEDIIKTLTLFEDKDMIHERLQKYSDIFTANQLKKLERRHYTGWGRLSYKLINGIRNKENNKTILDYLIDDGSANRNFMQLINDDTLPFKQIIQKSQ | |
| | VVGDVDDIEAVVHDLPGSPAIKKGILQSVKIVDELVKVMGDNPDNIVIEMARENQTTNRGRSQSQQRLKKLQSSLKELGSNILNEEKPSYIEDKVENSHLQNDQLFLYYIQNGKDMYTG | |
| | DELDIDHLSDYDIDHIIPQAFIKDDSIDNRVLTSSAKNRGKSDDVPSLDIVRARKAEWVRLYKSGLISKRKFDNLTKAERGGLTEADKAGFIKRQLVETRQITKHVAQILDARFNTEHD | |
| | ENDKVIRDVKVITLKSNLVSQFRKDFEFYKVREINDYHHAHDAYLNAVVGTALLKKYPKLASEFVYGEYKKYDIRKFITNSSDKATAKYFFYSNLMNFFKTKVKYADGTVFERPIIETN | |
| | ADGEIAWNKQIDFEKVRKVLSYPQVNIVKKVETQTGGFSKESILPKGDSDKLIPRKTKKVYWDTKKYGGFDSPTVAYSVFVVADVEKGKAKKLKTVKELVGISIMERSFFEENPVEFLE | |
| | NKGYHNIREDKLIKLPKYSLFEFEGGRRRLLASASELQKGNEMVLPGYLVELLYHAHRADNFNSTEYLNYVSEHKKEFEKVLSCVEDFANLYVDVEKNLSKIRAVADSMDNFSIEEISN | |
| | SFINLLTLTALGAPADFNFLGEKIPRKRYTSTKECLTATLIHQSITGLYETRIDLSKLGEE | |
| 358 | MTKKNYSIGLDIGTNSVGWAVITDDYKVPAKKMKVLGNTDKKYIKKNLLGALLFDSGETAEATRLKRTARRRYTRRKNRLRYLQEIFANEIAKVDESFFQRLDESFLTDDDKTFDSHPI | WP_039695303.1 |
| | FGNKAEEDAYHQKFPTIYHLRKHLADSSEKADLRLVYLALAHMIKFRGHFLIEGELNAENTDVQKIFADFVGVYNRTFDDSHLSEITVDVASILTEKISKSRRLENLIKYYPTEKKNTL | [Streptococcus |
| | FGNLIALALGLQPNFKTNFKLSEDAKLQFSKDTYEEDLEELLGKIGDDYADLFTSAKNLYDAILLSGILTVDDNSTKAPLSASMIKRYVEHHEDLEKLKEFIKANKSELYHDIFKDKNK | gallolyticus] |
| | NGYAGYIENGVKQDEFYKYLKNILSKIKIDGSDYFLDKIEREDFLRKQRTFDNGSIPHQIHLQEMHAILRRQGDYYPFLKEKQDRIEKILTFRIPYYVGPLVRKDSRFAWAEYRSDEKI | |
| | TPWNFDKVIDKEKSAEKFITRMTLNDLYLPEEKVLPKHSHVYETYAVYNELTKIKYVNEQGKESFFDSNMKQEIFDHVFKENRKVTKEKLLNYLNKEFPEYRIKDLIGLDKENKSFNAS | |
| | LGTYHDLKKILDKAFLDDKVNEEVIEDIIKTLTLFEDKDMIHERLQKYSDIFTANQLKKLERRHYTGWGRLSYKLINGIRNKENNKTILDYLIDDGSANRNFMQLINDDTLPFKQIIQK | |
| | SQVVGDVDDIEAVVHDLPGSPAIKKGILQSVKIVDELVKVMGGNPDNIVIEMARENQTTNRGRSQSQQRLKKLQNSLKELGSNILNEEKPSYIEDKVENSHLQNDQLFLYYIQNGKDMY | |
| | TGDELDIDHLSDYDIDHIIPQAFIKDDSIDNRVLTSSAKNRGKSDDVPSLDIVRARKAEWVRLYKSGLISKRKFDNLTKAERGGLTEADKAGFIKRQLVETRQITKHVAQILDARFNTE | |
| | HDENDKVIRDVKVITLKSNLVSQFRKDFEFYKVREINDYHHAHDAYLNAVVGTALLKKYPKLASEFVYGEYKKYDIRKFITNSSDKATAKYFFYSNLMNFFKTKVKYADGTVFERPIIE | |
| | TNADGEIAWNKQIDFEKVRKVLSYPQVNIVKKVETQTGGFSKESILPKGDSDKLIPRKTKKVYWDTKKYGGFDSPTVAYSVFVVADVEKGKAKKLKTVKELVGISIMERSFFEENPVEF | |
| | LENKGYHNIREDKLIKLPKYSLFEFEGGRRRLLASASELQKGNEMVLPGYLVELLYHAHRADNFNSTEYLNYVSEHKKEFEKVLSCVEDFANLYVDVEKNLSKIRAVADSMDNFSIEEI | |
| | SNSFINLLTLTALGAPADFNFLGEKIPRKRYTSTKECLNATLIHQSITGLYETRIDLSKLGEE | |
| 359 | MTQKYSIGLDIGTNSVGWAIVTDDYKVPAKKMKILGNTNKQYIKKNLLGALLFDSGETAKATRLKRTARRRYTRRKNRLRYLQEIFIEEMNKVDENFFQRLDDSFLVTEDKRGSKYPIF | WP_048800889.1 |
| | GTLKEEKEYYKEFETIYHLRKRLADSTGKVDLRLVYLALAHMIKFRGHFLIEGQLKAENTDVQTLFNDFVEVYDKTIEESHLAEITVDALSILTEKVSKSRRLENLVKCYPTEKKNTLF | [Streptococcus |
| | GNLIALSLGLQPNFKTNFQLSEDAKLQFSKDTYEEDLEELLGKIGDDYADLFTSAKNLYDTILLSGILAVDDNSTKALLSASMIKRYEEHQKDLKKLKDFIKVNAPAQYDDIFKDETKN | constellatus] |
| | GYAGYIENGVKQDEFYKYLKNTLSKIDGSGYFLDKIEREDFLRKQRTFDNGSIPHQIHLQEMHAILRRQGEHYPFLKENQDKIEKILTFRIPYYVGPLVRKGSRFAWAEYKADEKITPW | |
| | NFDDILDKEKSAEKFITRMTLNDLYLPEEKVLPKHSLLYEIFTVYNELTKVKYVNEQGEAKFFDANMKQEIFDHVFKENPKVTKDKLLNYLDKEFDEFRIVDLTGLDKENKAFNASLGT | |
| | YHDLRKILDKSFLDDKANEKTIEDIIQTLTLFEDREMIRQRLQKYSDIFTKAQLKKLERRHYTGWGRLSYKLINGIRNKENNKTILEYLVDDGYANRNFMQLINDDTLPFKQIIKDAQA | |
| | IDDVDDIELIVHDLPGSPAIKKGILQSIKIVDELVKVMGYNPDNIVIEMARENQTTTKGRRNSQQRLKLLQDSLTNLDNPVSIKNVENQQLQNDRLFLYYIQNGKDMYTGEELDIHHLS | |
| | DYDIDHIIPQAFIKDDSIDNRVLTSSAKNRGKSDNVPNLEVVCDRKADWIRLREAGLISQRKFDNLTKAERGGLTENDKAGFIHRQLVETRQITKHVAQILDARFNPKRDDNKKVIRDV | |
| | KIITLKSNLVSQFRRDFKLYKVREINDYHHAHDAYLNAVVGTALLKKYPKLTSEFVYGEYKKYDVRKFIAKSDNDEIGKATAKYFFYSNLMNFFKTEVKFADGTVVERPDIETSEDGEI | |
| | AWNKQTDFKIVRKVLSYPQVNIVKKVEKQTGRFSKESILPKGDSDKLIARKTKENYWDTKKYGGFDSPTVAYSVLVVADIKKGKAKKLKTVKELVGISIMERPFFEKNPIMFLESKGYR | |
| | NIQKDKLIKLPKYSLFEFEGGRRRLLASAVELQKGNEMVLPQYLNNLLYHAHRIDNSDNSEHLKYITEHKEEFGKLLSYIENFAKSYVDVDKNLEKIQLAVEKIDSFSVKEISNSFIHL | |
| | LTLTALGAPADFNFLGEKIPRKRYTSTKECLNATLIHQSITGLYETQTDLSKLGED | |
| 360 | MVEKKSYSIGLDIGTNSVGWAVITDDYKVPAKKMKVLGNTSRQSIKKNMIGALLFDEGGPAASTRVKRTTRRRYTRRKNRLCYLRDIFESEMHTIDKHFFLRLEDSFLHKSDKRYEAHP | WP_054279288.1 |
| | IFGTLQEEKAYHDNYPTIYHLRKALADNTEKADLRLIYLALAHIIKFRGHFLIEGALSANNTDVQQLVHALVDAYNIMFEEDQLDIEAIDVKAILTEKISKTRRLENLISNIPGQKKNG | [Streptococcus |
| | LFGNLIALSLGLTPNFKSHFNLPEDAKLQLAKDTYDEELNNLLTQIGDEYADLFLSAKNLSDAILLSDILTVNGDGTQAPLSASLIKRYEEHRQDLALLKQMFKEQLPDLYRDVFTDEN | phocae] |
| | KDGYAGYISGKTSQEAFYKYIKPILETLDGAEDFLTKINREDFLRKQRTFDNGSIPHQIHLGELQAILERQQAYYPFLKDNQEKIEKILTFRIPYYIGPLARGNSRFAWLTRTSDQKIT | |
| | PWNFDEMVDQEASAQAFIERMTNFDEYLPQEKVLPKHSLTYEYFTVYNELTKVKYVTEGMTKPEFLSAGQKEQIVELLFKKYRKVTVKQLKEDFFSKIECFDTVDISGVEDKFNASLGT | |
| | YHDLLKIIKDKAFLDNSENENIIEDIILTLTLFEDKEMIANRLAVYEDLFDQNVLKQLKRRHYTGWGRLSKQLINGMRDKHTGKTILDFLKADGFINRNFMQLINDDNLSFKEEIKKAQ | |
| | EGGLKDSINDQIRDLAGSPAIKKGILQTINIVDEIVKIMGKAPQHIVVEMARDVQKTDIGVKQSRERMKRVQEVLKKLGSQLLKEHPVENFQLQNERLYLYYLQNGKDMYTGEELSISN | |
| | LSHYDIDHIIPRSFIKDDSIDNKVLTRSEHNRGKTDNVPSIEVVKRMKPYWQKLLDTKVISQRKFDNLTKAERGGLQESDKANFIQRQLVETRQITKHVAQILDSRFNTERDEKDRPIR | |
| | RVKVITLKSKFVSDFRQDFGFYKLREINDYHHAHDAYLNAVVGTALLKMYPKLASEFVYGDYQKYDLKRMVGKSGKASGHATAKYFFYSNLMNFFKSEVKLANGNIIKRSPIEVNEETG | |
| | EIVWDKTKDFGTVRKVLSAPQVNIVKKTEIQTGGFSNETILSKGKSSKLIPRKNKWRDTTKYGGFNTPTVAYSVLVVAKVEKGKAKKLKPVKELVGITIMERTKFEANPIAFLESKGYH | |
| | DIQEHLMITLPKYSLFELENGRRRLLASATELQKGNEMVLPQHLVTFLYRVSKRDKGTQSENMEYISNHKEKFIEIFHYIIRYAEKNVIKPKVIERLNDTFNQKFNDSDLTELSISFLN | |
| | LFKFTSFGAPEKFTFLNSEIKQDDVRYRSTKECLNSTLIHQSVTGLYETRIDLSQFGGD | |
| 361 | MWGVSLFEAGKTAAERRGYRSTRRRLNHRKFRLRLLEDMFEKEILSKDPSFFIRLKEAFLSPKDEQKQFKGNILFNDKDYTDADYYEQYKTIYHLRYDLISQHRQFDIREVYLAIHHLI | WP_029090905.1 |
| | KYRGHFIYEDQTFTTDGNQLQHHIKAIITMINSTLNRIIIPETIDINVFEKILLDRMMNRSSKVKFLIELTGEDKQDKPLLKELFNLIVGLKAKPASIFEQENLATIVETMNMSTEQVQ | [Brochothrix |
| | LDLLTLADVLADEEYDLLLTAQKIYSAIILDESMDGYEYFAEAKKESYRKHQEELVLVKKMLKSNAITNDERAKFEYFYTDYIGAKSSNYEESKNIKKGLSAAYGKYSKEERLFKHIEL | thermosphacta] |
| | LLAKENVLTTVEHALLEKNITFASLLPLQRSSRNAVIPYQVHEKELVAILENQATYYPFLLEQKDNIHKLLTFRIPYYVGPLADQKDSEFAWMVRKQAGKITPFNFEEMVDIDASSEAF | |
| | IKRMTNKCTYLIHEDVIPKHSFSYAKFEVLNELNKIRLDGKPIDIPLKKRIFEGLFLEKTKVTQTSLKKWLAEHEHMTVSVVQGTQKETEFATSLQAFHRFVKIFDRETVSNPANEEMF | |
| | EKIIYWSTVFEDKKIMRRKLSEYPQLTEQQQVQLAQVRFRGWGRLSQRLINRIKTPVSGDEDHKLSINEILWQTNENFMQIIRNKDYLFKKIIEEQFENETALLNKQRIDELAASPANK | |
| | KGIWQAIKIVKELEKVLQQPAENIFIEFARSDEESKRSTPRDKFIEKAYAQLKKETDTFNLEHLKELKQRSKQLSSQRLFLYFIQNGKCMYSGEHLDIERLDSYEVDHILPQSYIKDNS | |
| | IENLALVKKVENQRKKDSLLLNSSIINQNYSRWEQLKNAGLIGEKKFRNLTRTKITDRDKEGFIARQLVETRQITKHVTQLLQQEYKDTTKVFAIKATLVSGLRRKFEFIKNRNVNDYH | |
| | HAQDAFLVAFLGTNITSNYPKIEMEYLFKGYQHYLNEVGKSAAKPKFTFIVENLSKQQYNSTTGEVKWNPEVDIAKLKRILNFKQCNIVRKVEEQSGALFKETIYPVEESSSKTIPLKK | |
| | HLDTAIYGGYTAVNYASYALIQFKKGRKLKREIIGIPLAVQTRIDNSETSLQAYIAEQIKSEVEILNGRILKYQLISNNGNRLYIAGPSERHNARQLIVSDEAAKVIWLISTKQADEAM | |
| | FLKYYRLEHLEAVFEELIRKQAADYQIFEKLIKKIEVNKVYFYSCTYNEKVKVIEELLKITQANATNGDLKLLKMSNREGRLGSVSVALDFKIINQSVTGLYQSIEDYNN | |
| 362 | PDNSDVDKLFIQLVQTYNQLFEENPINASGVDAKAILSARLSKSRRLENLIAQLPGEKKNGLFGNLIALSLGLTPNFKSNFDLAEDAKLQLSKDTYDDDLDNLLAQIGDQYADLFLAAK | WP_033888930.1 |
| | NLSDAILLSDILRVNTEITKAPLSASMIKRYDEHHQDLTLLKALVRQQLPEKYKEIFFDQSKNGYAGYIDGGASQEEFYKFIKPILEKMDGTEELLVKLNREDLLRKQRTFDNGSIPHQ | [Streptococcus |
| | IHLGELHAILRRQEDFYPFLKDNREKIEKILTFRIPYYVGPLARGNSRFAWMTRKSEETITPWNFEEVVDKGASAQSFIERMTNFDKNLPNEKVLPKHSLLYEYFTVYNELTKVKYVTE | pyogenes] |
| | GMRKPAFLSGEQKKAIVDLLFKTNRKVTVKQLKEDYFKKIECFDSVEISGVEDRFNASLGTYHDLLKIIKDKDFLDNEENEDILEDIVLTLTLFEDREMIEERLKTYAHLFDDKVMKQL | |
| | KRRRYTGWGRLSRKLINGIRDKQSGKTILDFLKSDGFANRNFMQLIHDDSLTFKEDIQKAQVSGQGDSLHEHIANLAGSPAIKKGILQTVKVVDELVKVMGRHKPENIVIEMARENQTT | |
| | QKGQKNSRERMKRIEEGIKELGSQILKEHPVENTQLQNEKLYLYYLQNGRDMYVDQELDINRLSDYDVDHIVPQSFLKDDSIDNKVLTRSDKNRGKSDNVPSEEVVKKMKNYWRQLLNA | |
| | KLITQRKFDNLTKAERGGLSELDKAGFIKRQLVETRQITKHVAQILDSRMNTKYDENDKLIREVKVITLKSKLVSDFRKDFQFYKVREINNYHHAHDAYLNAVVGTALIKKYPKLESEF | |
| | VYGDYKVYDVRKMIAKSEQEIGKATAKYFFYSNIMNFFKTEITLANGEIRKRPLIETNGETGEIVWDKGRDFATVRKVLSMPQVNIVKKTEVQTGGFSKESILPKRNSDKLIARKKDWD | |
| | PKKYGGFDSPTVAYSVLVVAKVEKGKSKKLKSVKELLGITIMERSSFEKNPIDFLEAKGYKEVKKDLIIKLPKYSLFELENGRKRMLASAGELQKGNELALPSKYVNFLYLASHYEKLK | |
| | GSPEDNEQKQLFVEQHKHYLDEIIEQISEFSKRVILADANLDKVLSAYNKHRDKPIREQAENIIHLFTLTNLGAPAAFKYFDTTIDRKRYTSTKEVLDATLIHQSITGLYETRIDLSQL | |
| | GGD | |
| 363 | MDYKDDDDKDYKDDDDKMAPKKKRKVGIHGVPAADKKYSIGLDIGTNSVGWAVITDEYKVPSKKFKVLGNTDRHSIKKNLIGALLFDSGETAEATRLKRTARRRYTRRKNRICYLQEIF | AGZ01981.1 |
| | SNEMAKVDDSFFHRLEESFLVEEDKKHERHPIFGNIVDEVAYHEKYPTIYHLRKKLVDSTDKADLRLIYLALAHMIKFRGHFLIEGDLNPDNSDVDKLFIQLVQTYNQLFEENPINASG | [synthetic |
| | VDAKAILSARLSKSRRLENLIAQLPGEKKNGLFGNLIALSLGLTPNFKSNFDLAEDAKLQLSKDTYDDDLDNLLAQIGDQYADLFLAAKNLSDAILLSDILRVNTEITKAPLSASMIKR | construct] |
| | YDEHHQDLTLLKALVRQQLPEKYKEIFFDQSKNGYAGYIDGGASQEEFYKFIKPILEKMDGTEELLVKLNREDLLRKQRTFDNGSIPHQIHLGELHAILRRQEDFYPFLKDNREKIEKI | |
| | LTFRIPYYVGPLARGNSRFAWMTRKSEETITPWNFEEVVDKGASAQSFIERMTNFDKNLPNEKVLPKHSLLYEYFTVYNELTKVKYVTEGMRKPAFLSGEQKKAIVDLLFKTNRKVTVK | |
| | QLKEDYFKKIECFDSVEISGVEDRFNASLGTYHDLLKIIKDKDFLDNEENEDILEDIVLTLTLFEDREMIEERLKTYAHLFDDKVMKQLKRRRYTGWGRLSRKLINGIRDKQSGKTILD | |
| | FLKSDGFANRNFMQLIHDDSLTFKEDIQKAQVSGQGDSLHEHIANLAGSPAIKKGILQTVKVVDELVKVMGRHKPENIVIEMARENQTTQKGQKNSRERMKRIEEGIKELGSQILKEHP | |
| | VENTQLQNEKLYLYYLQNGRDMYVDQELDINRLSDYDVDHIVPQSFLKDDSIDNKVLTRSDKNRGKSDNVPSEEVVKKMKNYWRQLLNAKLITQRKFDNLTKAERGGLSELDKAGFIKR | |
| | QLVETRQITKHVAQILDSRMNTKYDENDKLIREVKVITLKSKLVSDFRKDFQFYKVREINNYHHAHDAYLNAVVGTALIKKYPKLESEFVYGDYKVYDVRKMIAKSEQEIGKATAKYFF | |
| | YSNIMNFFKTEITLANGEIRKRPLIETNGETGEIVWDKGRDFATVRKVLSMPQVNIVKKTEVQTGGFSKESILPKRNSDKLIARKKDWDPKKYGGFDSPTVAYSVLVVAKVEKGKSKKL | |
| | KSVKELLGITIMERSSFEKNPIDFLEAKGYKEVKKDLIIKLPKYSLFELENGRKRMLASAGELQKGNELALPSKYVNFLYLASHYEKLKGSPEDNEQKQLFVEQHKHYLDEIIEQISEF | |
| | SKRVILADANLDKVLSAYNKHRDKPIREQAENIIHLFTLTNLGAPAAFKYFDTTIDRKRYTSTKEVLDATLIHQSITGLYETRIDLSQLGGDKRPAATKKAGQAKKKK | |
| 364 | MDKKYSIGLDIGTNSVGWAVITDEYKVPSKKFKVLGNTDRHSIKKNLIGALLFDSGETAEATRLKRTARRRYTRRKNRICYLQEIFSNEMAKVDDSFFHRLEESFLVEEDKKHERHPIF | AIT42264.1 |
| | GNIVDEVAYHEKYPTIYHLRKKLVDSTDKADLRLIYLALAHMIKFRGHFLIEGDLNPDNSDVDKLFIQLVQTYNQLFEENPINASGVDAKAILSARLSKSRRLENLIAQLPGEKKNGLF | [Cloning vector |
| | GNLIALSLGLTPNFKSNFDLAEDAKLQLSKDTYDDDLDNLLAQIGDQYADLFLAAKNLSDAILLSDILRVNTEITKAPLSASMIKRYDEHHQDLTLLKALVRQQLPEKYKEIFFDQSKN | pYB196] |
| | GYAGYIDGGASQEEFYKFIKPILEKMDGTEELLVKLNREDLLRKQRTFDNGSIPHQIHLGELHAILRRQEDFYPFLKDNREKIEKILTFRIPYYVGPLARGNSRFAWMTRKSEETITPW | |
| | NFEEVVDKGASAQSFIERMTNFDKNLPNEKVLPKHSLLYEYFTVYNELTKVKYVTEGMRKPAFLSGEQKKAIVDLLFKTNRKVTVKQLKEDYFKKIECFDSVEISGVEDRFNASLGTYH | |
| | DLLKIIKDKDFLDNEENEDILEDIVLTLTLFEDREMIEERLKTYAHLFDDKVMKQLKRRRYTGWGRLSRKLINGIRDKQSGKTILDFLKSDGFANRNFMQLIHDDSLTFKEDIQKAQVS | |
| | GQGDSLHEHIANLAGSPAIKKGILQTVKVVDELVKVMGRHKPENIVIEMARENQTTQKGQKNSRERMKRIEEGIKELGSQILKEHPVENTQLQNEKLYLYYLQNGRDMYVDQELDINRL | |
| | SDYDVDHIVPQSFLKDDSIDNKVLTRSDKNRGKSDNVPSEEVVKKMKNYWRQLLNAKLITQRKFDNLTKAERGGLSELDKAGFIKRQLVETRQITKHVAQILDSRMNTKYDENDKLIRE | |
| | VKVITLKSKLVSDFRKDFQFYKVREINNYHHAHDAYLNAVVGTALIKKYPKLESEFVYGDYKVYDVRKMIAKSEQEIGKATAKYFFYSNIMNFFKTEITLANGEIRKRPLIETNGETGE | |
| | IVWDKGRDFATVRKVLSMPQVNIVKKTEVQTGGFSKESILPKRNSDKLIARKKDWDPKKYGGFDSPTVAYSVLVVAKVEKGKSKKLKSVKELLGITIMERSSFEKNPIDFLEAKGYKEV | |
| | KKDLIIKLPKYSLFELENGRKRMLASAGELQKGNELALPSKYVNFLYLASHYEKLKGSPEDNEQKQLFVEQHKHYLDEIIEQISEFSKRVILADANLDKVLSAYNKHRDKPIREQAENI | |
| | IHLFTLTNLGAPAAFKYFDTTIDRKRYTSTKEVLDATLIHQSITGLYETRIDLSQLGGDGGSGPPKKKRKVYPYDVPDYA | |
| 365 | MKKPYSIGLDIGTNSVGWSVVTDDYKVPAKKMKVLGNTDKEYIKKNLIGALLFDSGETAEATRMKRTARRRYTRRRNRILYLQDIFSPELNQVDESFLHRLDDSFLVAEDKRGERHVIF | CQR24647.1 |
| | GNIADEVKYHKEFPTIYHLRKHLADSSEKADLRLVYLALAHIIKYRGHFLIDEPIDIRNMNSQNLFKEFLLAFDGIQVDCYLASKHTDISGIITAKISKSRKVEAVLEQFPDQKKNSFF | [Streptococcus |
| | GNMVSLVFGLMPNFKSNFELDEDAKLQFSRDSYDEDLENLLGIIGDEYADVFVAAKKVYDSILLSGILTTNNHSTKAPLSASMIDRYDEHNSDKKLLRDFIRTNIGKEVFKEVFYDTSK | sp. FF10] |
| | NGYAGYIDGKTNQEDFYKYLKNLLQKVDGGDYFIEKIEREDFLRKQRTFDNGSIPHQVHLDEMKAILRRQGEFYPFLKENAEKIQQILTFKIPYYVGPLARGNSRFAWASYNSNEKMTP | |
| | WNFDNVIDKTSSAQAFIERMTNNDLYLPDQKVLPKHSLLYQKFAVYNELTKIKYVTETGEARLFDVFLKKEIFDGLFKKERKVTKKKILNFLDKNFDEFRITDIQGLDNETGNFNASYG | |
| | TYHDLLKIIGDKEFMDSSDNVDVLEDIVLSLTLFEDREMIKQRLLKYEDIFSKKVIANLTRRHYTGWGRLSAKLINGIKDKHSRKTILDYLIDDGHSNRNFMQLINDDNLSFKDEIANS | |
| | QVIGDGDDLHQVVQELAGSPAIKKGILQSLKIVDELVKVMGYNPEQIVVEMARENQTTARGRNNSQQRLGSLTKAIQDFGSDILKRYPVENNQLQNDQLYLYYLQNGKDMYTGDTLDIH | |
| | NLSQYDIDHIIPQSFIKDNSLDNRVLTNSKSNRGKSDNVPSNEVVKRMKGFWLKQLDAKLISQRKFDNLTKAERGGLSAEDKAGFIKRQLVETRQITKHVARILDERFNRDFDKNDKRI | |
| | RNVKIVTLKSNLVSNFRKEFGFYKVREINNFHHAHDAYLNAVVAKALLIRYPKLEPEFVYGEYPKYNSYRERKSATEKMFFYSNIMNMFKTTIKLADGRVVEKPVIEANEETGEIAWDK | |
| | TKHFANVKKVLSYPQVSIVKKVEEQTGGFSKESILPKGGSDKLIARKTKNNYLSTQKYGGFDSPTVAYSIMFVADIEKGKSKRLKTVKEMIGITIMERSRFESNSVTFLEEKGYRNIRE | |
| | NTIIKFPKYSLFELENGRRRLLASAIELQKGNEMFLPQQFVNLLYHAQHANKEDSVIYLEKHRHELSELFHHIIGVSEKTILKPKVEMTLNEAFEKHFEFDEVSELAQSFISLLKFTAF | |
| | GAPGGFKFLDADIKQSNLRYQTVTEVLSSTLIHQSVTGLYETRIDLSKLGGE | |
| 366 | MKNMKNPYTIGLDIGTNSVGWAVLTNQYDLVKRKMKVAGNSDKKQIKKNFWGVRLFDDGQTAVDRRMNRTARRRIERRRNRISYLQEIFAVEMANIDANFFCRLNDSFYVDSEKRNSRH | AKI42028.1 |
| | PFFATIEEEVAYHKNYRTIYHLREELVNSSEKADLRLVYLALAHIIKYRGNFLIEGALDTKNTSVDGVYEQFIQTYNQVFMSNIEEGTLAKVEENIEVANILAGKFTRREKFERILQLY | [Listeria |
| | PGEKSTGMFAQFISLIVGSKGNFQKVFDLIEKTDIECAKDSYEEDLEALLAIIGDEYAELFVAAKNTYNAVVLSSIITVTATETNAKLSASMIERFDAHEKDLGELKAFIKLHLPKQYQ | monocytogenes] |
| | EIFNNAAIDGYAGYIDGKTKQVDFYKYLKTILENIEGADYFIAKIEEENFLRKQRTFDNGAIPHQLHLEELEAIIHQQAKYYPFLREDYEKIKSLVTFRIPYFVGPLAKGQSEFAWLTR | |
| | KADGEIRPWNIEEKVDFGKSAVDFIEKMTNKDTYLPKENVLPKHSLCYQKYMVYNELTKVRYIDDQGKTNYFSGQEKQQIFNDLFKQKRKVKKKDLELFLRNINHIESPTIEGLEDSFN | |
| | ASYATYHDLLKVGMKQEILDNPLNTEMLEDIVKILTVFEDKPMIKEQLQQFSDVLDGGVLKKLERRHYTGWGRLSAKLLVGIREKQSHLTILDYLMNDDGLNRNLMQLINDSNLSFKSI | |
| | IEKEQVSTTDKDLQSIVADLAGSPAIKKGILQSLKIVDELVSIMGYPPQTIVVEMARENQTTGKGKNNSKPRYKSLEKAIKEFGSKILKEHPTDNQELKNNRLYLYYLQNGKDMYTGQE | |
| | LDIHNLSNYDIDHIVPQSFITDNSIDNLVLTSSAGNREKGGDVPPLEIVRKRKVFWEKLYQGNLMSKRKFDYLTKAERGGLTDADKARFIHRQLVETRQITKNVANILHQRFNNETDNH | |
| | GNTMEQVRIVTLKSALVSQFRKQFQLYKVREVNDYHHAHDAYLNGVVANTLLKVYPQLEPEFVYGEYHQFDWFKANKATAKKQFYTNIMLFFGQKERIIDENGEILWDKKYLETIKKVL | |
| | DYRQMNIVKKTEIQKGEFSKATIKPKGNSSKLIPRKENWDPMKYGGLDSPNMAYAVIIEHAKGKKKLIFEKKIIRITIMERKMFEKDEEAFLEEKGYRHPKVLTKLPKYTLYECEKGRR | |
| | RMLASANEAQKGNQLVLSNHLVSLLYHAKNCEASDGKSLKYIEAHRETFSELLAQVSEFATRYTLADANLSKINNLFEQNKEGDIQAIAQSFVDLMAFNAMGAPASFKFFEATIDRKRY | |
| | TNLKELLSSTIIYQSITGLYESRKRLDD | |
| 367 | MKNMKNPYTIGLDIGTNSVGWAVLTNQYDLVKRKMKVAGNSDKKQIKKNFWGVRLFDDGQTAVDRRMNRTARRRIERRRNRISYLQEIFAVEMANIDANFFCRLNDSFYVDSEKRNSRH | AKI50529.1 |
| | PFFATIEEEVAYHKNYRTIYHLREELVNSSEKADLRLVYLALAHIIKYRGNFLIEGALDTKNTSVDGVYEQFIQTYNQVFMSNIEEGTLAKVEENIEVANILARKFTRREKFERILQLY | [Listeria |
| | PGEKSTGMFAQFISLIVGSKGNFQKVFDLIEKTDIECAKDSYEEDLETLLAIIGDEYAELFVAAKNTYNAVVLSSIITVTDTETNAKLSAS+IERFDAHEKDLVELKAFIKLNLPKQYE | monocytogenes] |
| | EIFSNAAIDGYAGYIDGKTKQVDFYKYLKTILENIEGADYFIAKIEEENFLRKQRTFDNGAIPHQLHLEELEAIIHQQAKYYPFLREDYEKIKSLVTFRIPYFVGPLAKGQSEFAWLTR | |
| | KADGEIRPWNIEEKVDFGKSAVDFIEKMTNKDTYLPKENVLPKHSLCYQKYMVYNELTKIRYIDDQGKTNYFSGQEKQQIFNDLFKQKRKVKKKDLELFLRNINHVESPTIEGLEDSFN | |
| | ASYATYHDLMKVGIKQEILDNPLNTEMLEDIVKILTVFEDKRMIKEQLQQFSDVLDGTVLKKLERRHYTGWGRLSAKLLVGIRDKQSHLTILDYLMNDDGLNRNLMQLINDSNLSFKSI | |
| | IEKEQVSTADKDLQSIVADLAGSPAIKKGILQSLKVVEELVSVMGYPPQTIVVEMARENQTTNKGKNNSKPRYKSLEKAIKEFGSQILKEHPTDNQELKNNRLYLYYLQNGKDMYTGQE | |
| | LDIHNLSNYDIDHIVPQSFITDNSIDNLVLTSSAGNREKGDNVPPLEIVQKRKIFWEKLYQGNLMSKRKFDYLTKAERGGLTEADKARFIHRQLVETRQITKNVANILHQRFNYKTDDN | |
| | EDTMEPVRIVTLKSALVSQFRKQFQLYKVREVNDYHHAHDAYLNGVVANTLLKVYPQLEPEFVYGEYHQFDWFKANKATAKKQFYTNIMLFFAQKERIIDENGEILWDKKYLETIKKVL | |
| | NYRQMNIVKKTEIQKGEFSNQNPKPRGDSSKLIPKKTNLNPIKYGGFEGSNMAYAIIIEHEKRKKKVTIEKKLIQINIMERKAFEKDEKVFLEGKGYHQPKVLTKLPKYALYECENGRR | |
| | RMLGSANEVHKGNQMLLPNHLMTLLYHAEKREAIDGESLAYIEAHKAVFGELLAHISEFARKYTLANDKLDEINMLYERNKDGDVKSIAESFVSLKKFNAFGVHKDFNFFGTTIKRKRD | |
| | RKLKELLNSTIIYQSITGLYESRKRLDS | |
| 368 | MNKPYSIGLDIGTNSVGWSIITDDYKVPAKKMRVLGNTDKEYIKKNLIGALLFDGGNTAADRRLKRIARRRYTRRRNRILYLQEIFAEKMSKVDDSFFHRLEDSFLVEEDKRGSKYPIF | CCW 2033.1 |
| | ATLQEEKDYHEKFPTIYHLRKELADKKEKADLRLVYLALAHIIKFRGHFLIEDDRFDVRNTDIQKQYQAFLEIFDTTFENNHLLSQNVDVEAILTDKISKSAKKDRILAQYPDQKSTGI | [Streptococcus |
| | FAEFLKLIVGNQADFKKHFNLEDKTPLQFAKDSYDEDLENLLGQIGDEFADLFSAAKKLYDSVLLSGILTVTDLSTKAPLSASMIQRYDEHREDLKQLKQFVKASLPEKYQEIFADSSK | agalactiae |
| | DGYAGYIEGKTNQEAFYKYLSKLLTKQEGSEYLLEKIKNEDFLRKQRTFDNGSIPHQVHLTELRAIIRRQSEYYPFLKENLDRIEKILTFRIPYYVGPLAREKSDFAW+TRKTDDSIRP | ILRI11z] |
| | WNFEELVDKEASAEAFIHCMTNNDLYLPEEKVLPKHSLIYEKFTVYNELTKVRYKNEQGETYFFDSNIKQEIFDGVFKEYRKVSKKQLLDFLAKEFEEFRIVDVTGLDKENKAFNASLG | |
| | TYHDLEKILGKDFLDNPDNESILEDIVQTLTLFEDREMIKKRLDIYKDFFTESQLKKLYRRHYTGWGRLSAKLINGIRNKENQKTILDYLIDDGSANRNFMQLIKDAGLSFKSIISKAQ | |
| | SGSHSDNLKEVVSELAGSPAIKKGILQSLKIVDELVKVMGYKPEQIVVEMARENQTTNQGRRNSRQRYKLLDDGVRNLASDLNGNILKEYPTDNQALQNERLFLYYLQNGRDMYTEKAL | |
| | DIDNLSQYDIDHIIPQAFIKDDSIDNRVLVSSAKNRGKSDDVPSLEIVKDCKVFWKKLLDAKLMSQRKYDNLTKAERGGLTSDDKARFIQRQLVETRQITKHVARILDERFNNELDSKG | |
| | RRIRKVKIVTLKSNLVSNFRKEFGFYKIREVNDYHHAHDAYLNAVVAKAILTKYPQLEPEFVYGDYPKYNSYKTRKSATEKLFFYSNIMNFFKTKVTLADGTVVVKDDIEVNNDTGEIV | |
| | WDKKKHFATVRKVLSYPQNNIVKKTEIQTGGFSKESILAHGNSDKLIPRKTKDIYLDPKKYGGFDSPIVAYSVLVVADIKKGKAQKLKTVTELLGITIMERSRFEKNPSAFLESKGYLN | |
| | IRTDKLIILPKYSLFELENGRRRLLASAGELQKGNELALPTQFMKFLYLASRYNESKGKPEEIEKKQEFVNQHVSYFDDILQIINDFSNRVILADANLEKINKLYQDNKENISVDELAN | |
| | NIINLFTFTSLGAPAAFKFFDKIVDRKRYTSTKEVLNSTLIHQSITGLYETRIDLGKLGED | |
| 369 | MNKPYSIGLDIGTNSVGWSIITDDYKVPAKKMRVLGNTDKEYIKKNLIGALLFDGGNTAADRRLKRTARRRYTRRRNRILYLQEIFAEEMSKVDDSFFHRLEDSFLVEEDKRGSKYPIF | CFQ25032.1 |
| | ATLQEEKDYHEKFSTIYHLRKELADKKEKADLRLIYIALAHIIKFRGHFLIEDDSFDVRNTDISKQYQDFLEIFNTTFENNDLLSQNVDVEAILTDKISKSAKKDRILAQYPNQKSTGI | [Streptococcus |
| | FAEFLKLIVGNQADFKKYFNLEDKTPLQFAKDSYDEDLENLLGQIGDEFADLFSAAKKLYDSVLLSGILTVIDLSTKASLSDSMIQRYDEHREDLKQLKQFVKASLPEKYQEIFADSSK | agalactiae] |
| | DGYAGYIEGKTNQEAFYKYLSKLLTKQEDSENFLEKIKNEDFLRKQRTFDNGSIPHQVHLTELKAIIRRQSEYYPFLKENQDRIEKILTFRIPYYIGPLAREKSDFAWMTRKTDDSIRP | |
| | WNFEDLVDKEKSAEAFIHRMTNNDFYLPEEKVLPKHSLIYEKFTVYNELTKVRYKNEQGETYFFDSNIKQEIFDGVFKEHRKVSKKKLLDFLAKEYEEFRIVDVIGLDKENKAFNASLG | |
| | TYHDLEKILDKDFLDNPDNESILEDIVQTLTLFEDREMIKKRLENYKDLFTESQLKKLYRRHYTGWGRLSAKLINGIRDKESQKTILDYLIDDGRSNRNFMQLINDDGLSFKSIISKAQ | |
| | AGSHSDNLKEVVGELAGSPAIKKGILQSLKIVDELVKVMGYEPEQIVVEMARENQTTNQGRRNSRQRYKLLDDGVKNLASDLNGNILKEYPTDNQALQNERLFLYYLQNGRDMYTGEAL | |
| | DIDNLSQYDIDHIIPQAFIKDDSIDNRVLVSSAKNRGKSDDVPSLEIVKDCKVFWKKLLDAKLMSQRKYDNLTKAERGGLTSDDKARFIQRQLVETRQITKHVARILDERFNNELDSKG | |
| | RRIRKVKIVTLKSNLVSNFRKEFGFYKIREVNNYHHAHDAYLNAVVAKAILTKYPQLEPEFVYGDYPKYNSYKTRKSATEKLFFYSNIMNFFKTKVTLADGTVVVKDDIEVNNDTGEIV | |
| | WDKKKHFATVRKVLSYPQNNIVKKTEIQTGGFSKESILAHGNSDKLIPRKTKDIYLDPKKYGGFDSPIVAYSVLVVADIKKGKAQKLKTVTELLGITIMERSRFEKNPSAFLESKGYLN | |
| | IRADKLIILPKYSLFELENGRRRLLASAGELQKGNELALPTQFMKFLYLASRYNESKGKPEEIEKKQEFVNQHVSYFDDILQLINDFSKRVILADANLEKINKLYQDNKENISVDELAN | |
| | NIINLFTFTSLGAPAAFKFFDKIVDRKRYTSTKEVLNSTLIHQSITGLYETRIDLGKLGED | |
| 370 | MNKPYSIGLDIGTNSVGWSIITDDYKVPAKKMRVLGNTDKEYIKKNLIGALLFDGGNTAADRRLKRTARRRYTRRRNRILYLQEIFAEEMSKVDDSFFHRLEDSFLVEEDKRGSKYPIF | CFV16040.1 |
| | ATLQEEKDYHEKFSTIYHLRKELADKKEKADLRLIYIALAHIIKFRGHFLIEDDSFDVRNTDISKQYQDFLEIFNTTFENNDLLSQNVDVEAILTDKISKSAKKDRILAQYPNQKSTGI | [Streptococcus |
| | FAEFLKLIVGNQADFKKYFNLEDKTPLQFAKDSYDEDLENLLGQIGDEFADLFSAAKKLYDSVLLSGILTVIDLSTKAPLSASMIQRYDEHREDLKQLKQFVKASLPEKYQEIFADSSK | agalactiae] |
| | DGYAGYIEGKTNQEAFYKYLSKLLTKQEDSENFLEKIKNEDFLRKQRTFDNGSIPHQVHLTELKAIIRRQSEYYPFLKENQDRIEKILTFRIPYYIGPLAREKSDFAWMTRKTDDSIRP | |
| | WNFEDLVDKEKSAEAFIHRMTNNDFYLPEEKVLPKHSLIYEKFTVYNELTKVRYKNEQGETYFFDSNIKQEIFDGVFKEHRKVSKKKLLDFLAKEYEEFRIVDVIGLDKENKAFNASLG | |
| | TYHDLEKILDKDFLDNPDNESILEDIVQTLTLFEDREMIKKRLENYKDLFTESQLKKLYRRHYTGWGRLSAKLINGIRDKESQKTILDYLIDDGRSNRNFMQLINDDGLSFKSIISKAQ | |
| | AGSHSDNLKEVVGELAGSPAIKKGILQSLKIVDELVKVMGYEPEQIVVEMARENQTTNQGRRNSRQRYKLLDDGVKNLASDLNGNILKEYPTDNQALQNERLFLYYLQNGRDMYTGEAL | |
| | DIDNLSQYDIDHIIPQAFIKDDSIDNRVLVSSAKNRGKSDDVPSLEIVKDCKVFWKKLLDAKLMSQRKYDNLTKAERGGLTSDDKARFIQRQLVEIRQITKHVARILDERFNNELDSKG | |
| | RRIRKVKIVTLKSNLVSNFRKEFGFYKIREVNNYHHAHDAYLNAVVAKAILTKYPQLEPEFVYGDYPKYNSYKTRKSATEKLFFYSNIMNFFKTKVTLADGTVVVKDDIEVNNDTGEIV | |
| | WDKKKHFATVRKVLSYPQNNIVKKTEIQTGGFSKESILAHGNSDKLIPRKTKDIYLDPKKYGGFDSPIVAYSVLVVADIKKGKAQKLKTVTELLGITIMERSRFEKNPSAFLESKGYLN | |
| | IRADKLIILPKYSLFELENGRRRLLASAGELQKGNELALPTQFMKFLYLASRYNESKGKPEEIEKKQEFVNQHVSYFDDILQLINDFSKRVILADANLEKINKLYQDNKENISVDELAN | |
| | NIINLFTFTSLGAPAAFKFFDKIVDRKRYTSTKEVLNSTLIHQSITGLYETRIDLGKLGED | |
| 371 | MMKKEYSIGLDIGTNSVGWAVITDDYKVPAKKMKVLGNTDKQSIKKNLLGALLFDSGETAEATRLKRTARRRYTRRRNRLRYLQEIFAEEMMQVDESFFQRLDDSFLVEEDKRGSRYPI | WP_049516684.1 |
| | FGNIAAEVKYHDDFPTIYHLRKHLVDISQKADLRLVYLALAHMIKFRGHFLIEGQLKAENTNVQALFKDFVEVYDKTVEESHLSEMTVDALSILTEKVSKSRRLENLVECYPTEKKNTL | [Streptococcus |
| | FGNLIALSLGLQPNFKTNFQLSEDAKLQFSKDTYEEDLEGLLGEIGDEYADLFASAKNLYDAILLSGILAVDDNTTKAPLSASMVKRYEEHQKDLKKLKDFIKVNAPAQYDDIFKDETK | anginosus] |
| | NGYAGYIENGVKQDEFYKYLKNTLSKIDGSDYFLDKIDREDFLRKQRTFDNGSIPHQIHLQEMHAILRRQGEHYPFLKENQDKIEKILTFRIPYYVGPLARKGSRFAWAEYKADEKITP | |
| | WNFDDILDKEKSAEKFITRMTLNDLYLPEEKVLPKHSPLYETFTVYNELTKVKYVNEQGEAKFFDTNMKQEIFDHVFKENRKVTKDKLLNYLNKEFEEFRIVNLTGLDKENKAFNASLG | |
| | TYHDLRKILDKSFLDDKVNEKIIEDIIQTLTLFEDREMIRQRLQKYSDIFTTQQLKKLERRHYTGWGRLSYKLINGIRNKENKKTILDYLIDDGYANRNFMQLINDDALSFKEEIARAQ | |
| | IIGDVDDIANVVHDLPGSPAIKKGILQSVKIVDELVKVMGHNPANIIIEMARENQTTDKGRRNSQQRLKLLQDSLKNLDNPVNIKNVENQQLQNDRLFLYYIQNGKDMYTGETLDINNL | |
| | SQYDIDHIIPQAFIKDNSLDNRVLTRSDKNRGKSDDVPSIEVVHEMKSFWSKLLSVKLITQRKFDNLTKAERGGLTEEDKAGFIKRQLVETRQITKHVAQILDERFNTEFDGAQRRIRN | |
| | VKIITLKSNLVSNFRKEFELYKVREINDYHHAHDAYLNAVVGNALLLKYPQLEPEFVYGEYPKYNSYRSRKSATEKFLFYSNILRFFKKEDIQTNEDGEIAWNKEKHIKILRKVLSYPQ | |
| | VNIVKKTEEQTGGFSKESILPKGESDKLIPRKTKNSYWNPKKYGGFDSPVVAYSILVFADVEKGKSKKLRKVQDMVGITIMEKKRFEKHPVDFLEQRGYRNVRLEKIIKLPKYSLFELE | |
| | NKRRRLLASARELQKGNELVIPQRFTTLLYHSYRIEKDYEPEHREYVEKHKDEFKELLEYISVFSRKYVLADNNLTKIEMLFSKNKDAEVSSLAKSFISLLTFTAFGAPAAFNFFGENI | |
| | DRKRYTSVTECLNATLIHQSITGLYETRIDLSKLGED | |
| 372 | IFNDLFKQKRKVKKKDLELFLRNINQIESPTIEGLEDSFNASYATYHDLLKVGMKQEILDNPLNTEMLEDIVKILTVFEDKRMIKEQLQQFSDVLDGVVLKKLERRHYTGWGRLSAKLL | EFR83390.1 |
| | VGIRDKQSHLTILEYLMNDDGLNRNLMQLINDSNLSFKSIIEKEQVSTTDKDLQSIVADLAGSPAIKKGILQSLKIVDELVSIMGYPPQTIVVEMARENQTTVKGKNNSRPRYKSLEKA | [Listeria |
| | IKEFGSQILKEHPTDNQELKNNRLYLYYLQNGKDIYTGQELDIHNLSNYDIDHIVPQSFITDNSIDNLVLTSSAGNREKGDDVPPLEIVRKRKVFWEKLYQGNLMSKRKFDYLTKAERG | monocytogenes FSL |
| | GLTEADKARFIHRQLVETRQITKNVANILHQRFNNETDNHGNTMEQVRIVTLKSALVSQFRKQFQLYKVREVNDYHHAHDAYLNGVVANTLLKVYPQLEPEFVYGEYHQFDWFKANKAT | F2-208] |
| | AKKQFYTNIMLFFAQKERIIDENGEILWDKKYLETIKKVLDYRQMNIVKKTEIQKGEFSKATIKPKGNSSKLIPRKENWDPMKYGGLDSPNMAYAVIIEHAKGKKKIVIEKKLIQINIM | |
| | ERKMFEKDEEAFLEEKGYRHPKVLTKLPKYTLYECEKGRRRMLASANEAQKGNQLVLSNHLVSLLYHAKNCEASDGKSLKYTEAHRETFSELLAQVSEFATRYTLADANLSKINNLFEQ | |
| | NKEGDIKXIAQSFVDLMVFNAMGAPASFKFFEATIDRKRYTNLKELLSSTIIYQSITGLYESRKRLDD | |
| 373 | MKKPYSIGLDIGTNSVGWAVITDDYKVPAKKMKVLGNTNKESIKKNLIGALLFDAGNTAADRRLKRTARRRYTRRRNRILYLQEIFAAEMNKVDESFFHRLDDSFLVPEDKRGSKYPIF | WP_049523028.1 |
| | GTLEEEKEYHKQFPTIYYLRKILADSKEKVDLRLIYLALAHIIKYRGHFLYEDSFDIKNNDIQKIFNEFTILYDNTFEESSLSKGNAQVEEIFTDKISKSAKRDRVLKLFPDEKSTGLF | [Streptococcus |
| | SEFLKLIVGNQADFKKHFDLEEKAPLQFSKDTYEEDLESLLGQIGDVYADLFVVAKKLYDAILLAGILSVKDPGTKAPLSASMIERYDNHQNDLSALKQFVRRNLPEKYAEVFSDDSKD | parasanguinis] |
| | GYAGYIDGKTTQEGFYKYIKNLISKIEGAEYFLEKIEREDFLRKQRTFDNGSIPHQIHLQEMNAILRHQGEYYPFLKENKDKIEQILTFRIPYYVGPLARGNSDFAWLSRNSDEAIRPW | |
| | NFEEMVDKSSSAEDFIHRMTNYDLYLPEEKVLPKHSLLYETFTVYNELTKVKYIAEGMKDYQFLDSGQKKQIVNQLFKEKRKVTEKDIIHYLHNVDGYDGIELKGIEKHFNSSLSTYHD | |
| | LLKIIKDKEFMDDPKNEEIFENIVHTLTIFEDRVMIKQRLNQYDSIFDEKVIKALTRRHYTGWGKLSAKLINGIRDKKTSKTILDYLIDDGYSNRNFMQLINDDGLSFKETIQKAQVVG | |
| | ETNDVKQVVQELPGSPAIKKGILQSIKIVDELVKVMGHAPESVVIEMARENQTTNKGKSKSQQRLKTLSDAISELGSNILKEHPTDNIQLQNDRLFLYYLQNGKDMYTGEALDINQLSN | |
| | YDIDHIIPQAFIKDDSLDNRVLTSSKDNRGKSDNVPSLEIVEKMKGFWQQLLDSKLISERKFNNLTKAERGGLDERDKVGFIKRQLVETRQITKHVAQILDDRFNAEVNEKNQKLRSVK | |
| | IITLKSNLVSNFRKEFGLYKVREINDYHHAHDAYLNAVVAKAILKKYPKLEPEFVYGDYQKYDLKRYISRTKDPKEIEKATEKYFFYSNLLNFFKDKVYYADGTIIQRGNVEYSKDTGE | |
| | IAWNKKRDFAIVRKVLSYPQVNIVKKTEEQTGGFSKESILPKGNSDKLIPRKTKNVQLDTTKYGGFDSPVIAYSILLVADVEKGKSKKLKTVKSLIGITIMEKVKFEANPVAFLEGKGY | |
| | QNVVEENIIRLPKYSLFELENGRRRMLASAKELQKGNEMVLPSYLIALLYHAKRIQKKDEPEHLEYIKQHHSEFNDLLNFVSEFSQKYVLAESNLEKIKNLYIDNEQTNMEEIANSFIN | |
| | LLTFTAFGAPAVFKFFGKDIERKRYSTVTEILKATLIHQSLTGLYETRIDLSKLGEE | |
| 374 | MLGTVLFDSGETAQARRLKRTNRRRYTRRRYRLCQLQNIFATEMVKVDDTFFQRLSESFFYYQDKAFDKHPIFGNSKEERAYHKTYPTIYHLRKDLADRDQKADLRLIYLALSHIIKFR | EFR44625.1 |
| | GHFLIEGKLNSENTDVQKLFIALVTVYNLLFEEEPIAGETCDAKALLTAKTSKSKRLESLISEFPGQKKNGLFGNLLALALGLRPNFKSNFGLSEDAKLQITKDTYEEELDNLLAEIGD | [Streptococcus |
| | HYADLFLAAKNLSDAILLSDILTLSDENTRAPLSASMIKRYEEHQEDLALLKKLVKEQMPEKYWEIFSNAKKNGYAGYIEGKVSQEDFYRYIKPILSRLKGGDEFLAKIDRDDFLRKQR | pseudoporcinus |
| | TFDNGSIPHQIHLKELHAILRRQEKYYPFLAEQKEKIEQLLCFRIPYYVGPLAKGGNSSFAWLKRRSDEPITPWNFKDVVDEEASAQAFIEGMTNYDTYLPEEKVLPKHSPLYEMFTVY | SPIN 20026] |
| | NELTKVKYIAENMTKPLYLSAEQKEAIIDHLFKQTRKVTVKDLKEKYFSQIEGLENVDVTGVEGAFNASLGTYNDLLKIIKDKAFLDDEANAEILEEIVLILTLFQDEKLIEKRLAKYA | |
| | NLFEKSVLKKLRKRHYRGWGRLSRQLIDGMKDKASGKTILDFLKADDFANRNFIQLINDSSLDFEKLIDDAQKKAIKRESLTEAVANLAGSPAIKKGILQSLKVVDEIVKVMGHNPDNI | |
| | VIEMSRENQTTAQGLKNARQRLKKIKEVHKKTGSRILEDNSERITNLTLQDNRLYLYLLQDGKDMYTGQDLDINNLSQYDIDHIIPQSFIKDNSIDNLVLTTQKANRGKSDNVPSIEVV | |
| | RDMKDRVWRRQLANGAISRQKFDHLTKAERGGLADSDKARFLRRQLVETRQITKHVAQLLDSRFNSKSNQNKKLARNVKIITLKSKIVSDFRKDFGLYKLREVNNYHHAHDAYLNAVVG | |
| | TALLKKYPKLEAEFVYGDYKHFDLVKLISKSDPSLGKATAKVFFYSNIMNFFKEELSLADGTLMKRPVIETNTETGEVVWDKVKDFKTIRKVLSYPQVNIVKKTEIQSGAFSKESVLSK | |
| | GNSDKLIERKKGWDPKKYGGFDSPNTAYSIFVVAKVAKRKAQKLKTVKEIVGITIMEQAEYEKDNIAFLEKKGYQDIQEKLLIKLPKYSLFELENGRRRLLASANEFQKGNELALSGKY | |
| | MKFLYLASRYDKLSSKIESEQQKKLFVEQHLHYFDEILDIVVKHATCYIKAENNLKKIISLYKKKEAYSINEQALNMLNLFIFTSLGAPSTFVFFDETIDRKRYTTSSDVLNGILIQQS | |
| | ITGLYETRIDLSRFGGD | |
| 375 | MSNKPYSIGLDIGTNSVGWAVITDDYKVPSKKMKVLGNTDKHFIKKNLIGALLFDEGTTAEDRRLKRTARRRYTRRKNRLRYLQEIFSEEISKVDNSFFHRLDDSFLVPEDKRGSKYPI | WP_049531101.1 |
| | FATLTEEKEYYKQFPTIYHLRKQLADSKEKADLRLIYLTLAHMIKYRGHFLYEESFDIKNNDIQKIFNEFISIYDNTFEGSSLSGQNAQVEAIFTDKISKSTKRERVLKLFPDQKSTGL | [Streptococcus |
| | FSEFLKLIVGNQADFKKHFDLEEKAPLQFSKDTYDEDLENLLGQIGDDFADLFLVAKKLYDAILLSGILTVTDPSTKAPLSASMIERYENHQKDLAALKQFIKNNLPEKYDEVFSDQSK | pseudopneumoniae] |
| | EGYAGYIDSKTTQEAFYKYIKNLLSKIDGADYLLDKIEREDFLRKQRTFDNGSIPHQIHLQEMNAILRRQGEHYPFLKENREKIEKILTFRIPYYVGPLARGNRDFAWLTRNSDQAIRP | |
| | WNFEEIVDKASSAEAFINKMTNYDLYLPEEKVLPKHSLLYETFAVYNELTKVKFIAEGLRDYQFLDSGQKKKIINQLFKEKRKVTEKDLIHYLHNVDGYDGIELKGIEKQFNASLSTYH | |
| | DLLKIIKDKRFMDEPKNQEILENIVHTLTIFEDREMIKQRLAQYASIFDEKVIKTLTRRHYTGWGKLSAKLINCIRDRKTGKTILDYLIDDGYNNRNFMQLINDDGLSFKEIIQESQVV | |
| | GKPDDVKQIVQELPGSSAIKKGILQSIKLVDELVKVMGHDPESIVIEMARENQTTARGKKNSQQRYKRIEDSLKILASGLNSNILKEHPTDNIQLQNDRLFLYYLQNGKDMYTGNPLDI | |
| | NHLSSYDIDHIIPQAFIKDDSLDNRVLTSSKDNRGKSDNVPSLEVVQKRKAFWQQLLESKLISERKFNNLTKAERGGLNERDKVGFIKRQLVETRQITKHVAQILDSRFNTKVNEKNQK | |
| | IRTVKIITLKSNLVSNFRKEFRLYKVREINDYHHAHDAYLNAVVAKAILKKYPKLEPEFVYGDYQKYDLKRYISRSRDPKEIEKATEKYFFYSNLLNFFKEEVHYADGTIVKRENIEYS | |
| | KDTGEIAWNKEIDFATIRKILSLSQVNIVKKTEEQTVGQNGGLFDNNIVSKKKVVDASKLIPIKSGLSPEKYGGYARPTIAYSVLVIADIEKGKAKKLKRIKEMVGITIQDKKKFEANP | |
| | TAYLEEYGYKNINPNLIIKLPKYSLFKFNDGQRRLLASSIELQKGNELILPYHFTTLLYHAQRINKISEPIHKQYVETHQSEFEELLTTIISLSKKYIQKPIVESLLQQAFEQADKDIY | |
| | QLSESFISLLKLTSFGAPGAFRFLGVEISQSNVRYQSVSSCFNATLIHQSITGLYETRIDLSKLGED | |
| 376 | MSNKPYSIGLDIGTNSVGWAVITDDYKVPSKKMTVLGNTDKHFIKKNLIGALLFDEGTTAEDRRLKRTARRRYTRRKNRLRYLQEIFSGEMSKVDSSFFHRLDDSFLVPEDKRGSKYPI | WP_049549711.1 |
| | FATLVEEKEYHKQFPTIYHLRKQLADSKEKADLRLIYLVLAHMIKYRGHFLYEEAFDIKNNDIQKIFNEFISIYDNTFEGSSLSGQNAQVETIFTDKISKSAKRERVLKLFPDEKSTGL | [Streptococcus |
| | FSEFLKLIVGNQADFKKHFDLGEKAPLQFSKDTYDEDLENLLGQIGDDFADLFLVAKKLYDAILLSGILTVTDPSTKAPLSASMIERYENHQKDLTTLKQFIKNNLPEKYDEVFSDQSK | pseudopneumoniae] |
| | DGYAGYIDGKTTQEAFYKYIKNLLSKFEGTDYFLEKIEREDFLRKQRTFDNGSIPHQIHLQEMNAILRRQGEHYPFLKENKEKIEKILTFRIPYYVGPLARGNRDFAWLTRNSDQAIRP | |
| | WNFEEIVDKASSAEDFINKMTNYDLYLPEEKVLPKHSLLYETFAVYNELTKVKFIAEGLRDYQFLDSGQKKQIVNQLFKEKRKVTEKDIIHYLHTVDGYDGIELKGIEKQFNASLSTYH | |
| | DLLKIIKDKEFMDDSKNEAILENIVHTLTIFEDREMIKQRLAQYDSLFDKKVIKALTRRHYTGWGKLSAKLINGICDKQTGNTILDYLIDDGEINRNFMQLINDDGLSFKKIIQKSQVV | |
| | GETDDVKQVVRELPGSPAIKKGILQSIKIVDELVKVMDHAPESIVIEMARENQTTARGKKNSQQRYKRIEDSLKILASGLDSNILKENPTDNNQLQNDRLFLYYLQNGKDMYTGEALDI | |
| | NQLSSYDIDHIIPQAFIKDDSLDNRVLTSSKDNRGKSDNVPSLEVVQKRKAFWQQLLDSKLISERKFNNLTKAERERDGLNELDKVGFIKRQLVETRQITKHVAQILDARFNKEVTEKD | |
| | KKNRNVKIITLKSNLVSNFRKEFRLYKVREINDYHHAHDAYLNAVVAKAILKKYPKLEPEFVYGDYQKNDLKRYISRSKDPKDIEKATEKYFFYSNLLNFFKEEVHYADGTIVKRENIE | |
| | YSKDTGEIAWNKEKDFATIKKVLSYPQVNIVKKTEEQTVGQNGGLFDNNIVSKEKVVDASKLIPIKSGLSPEKYGGYARPTIAYSVLVIADIEKGKTKKLKRIKEMVGITIQDKKKFEA | |
| | NPIAYLEECGYKNINPNLIIKLPKYSLFEFNGGQRRLLASSIELQKGNELILPYHFTALLYHAQRINKFSEPIHKQYVEAHQNEFKELLTIIISLSKKYIQKPNVESLLHQAFEQADND | |
| | IYQLSESFISLLKLTSFGAPGAFKFLGAEISQSSVRYKPNSQFLDTTLIHQSITGLYETRIDLSKLGED | |
| 377 | MSNKPYSIGLDIGTNSVGWVIITDDYKVPSKKMKVLGNTDKHFIKKNLIGALLFDEGTTAEDRRLKRTARRRYTRRKNRLRYLQEIFAEEMNKVDSSFFHRLDDSFLVPEDKRGSKYPI | WP_049538452.1 |
| | FATLAEEKEYHKNFPTIYHLRKQLADSKEKADLRLIYLALAHMIKYRGHFLYEEAFDIKNNDIQKIFNEFINIYDNTFEGSSLSGQNEQVEAIFSDKISKSAKRERVLKLFPDEKSTGL | [Streptococcus |
| | FSEFLKLIVGNQADFKKHFDLEEKAPLQFSKDTYDEDLENLLGQIGDGFADLFLVAKKLYDAILLSGILTVTDPSTKAPLSASMIERYQNHQNDLASLKQFIKNNLPEKYDEVFSDQSK | pseudopneumoniae] |
| | DGYAGYVDGKTTQEAFYKYIKNLLSKFEGADYFLEKIEREDFLRKQRTFDNGSIPHQIHLQEMNAILRRQGEHYPFLKENKEKIEKILTFRIPYYVGPLARGNRDFAWLTRNSDQAIRP | |
| | WNFEEIVDKASSAEDFINKMTNYDLYLPEEKVLPKHSLLYETFAVYNELTKVKFIAEGLRDYQFLDSGQKKQIVNQLFKEKRKVTEKDIIQYLHNVDGYDGIELKGIEKQFNASLSTYH | |
| | DLLKIIKDKEFMDDSKNEEILENIVHTLTIFEDREMIKQRLAQYDSIFDEKVIKALTRRHYTGWGKLSAKLINGIRDKQTGKTILDYLIDDGYSNRNFMQLINDDGLSFKEIIQKAQVF | |
| | GKTNDVKQVVQELPGSPAIKKGILQSIKIVEELVKVMGHEPESIVIEMARENQTTTRGKKNSQQRYKRIENSLKILASGLNSKILKEHPTDNNQLQNDRLFLYYLQNGKDMYTGEALDI | |
| | NQLSSCDIDHIIPQAFIKDDSLDNRVLTSSKENRGKSDNVPCLEVVDKMKVFWQQLLDFKLISYRKFNNLTKAERGGLDERDKVGFIRRQLVETRQITKHVAQILDSRFNTEVTEKDKK | |
| | NRNVKIITLKSNLVSNFRKEFGLYKVREINDYHHAHDAYLNAVVAKAILKKYPKLEPEFVYGDYQKYDLKRYISRSKDPKDIEKATEKYFFYSNLLNFFKEEVHYADGTIVKRENIEYS | |
| | KDTGEIAWNKEKDFATIKKILSLPQVNIVKKTEEQTVGQNGGLFDNNIVSKKKVVDASKLIPIKSGLSPEKYGGYARPTIAYSVLVIADIEKGKTKKLKRIKEMIGITVQDKKIFESNP | |
| | IAYLEECGYKNINPNLIIKLPKYSLFEFNGGQRRLLASSIELQKGNELILPYHFTALLYHTQRINKISEPIHKQYVEAHQNEFKELLTTIISLSKKYIQKPNVESLLQQAFEQADKDIY | |
| | QLSESFISLLKLTSFGAPGAFKFLGVEISQSSVRYKPNSQFLDATLIHQSITGLYETRIDLSKLGED | |
| 378 | MAKVDDSFFHRLEESFLVEEDKKHERHPIFGNIVDEVAYHEKYPTIYHLRKKLVDSTDKADLRLIYLALAHMIKFRGHFLIEGDLNPDNSDVDKLFIQLVQTYNQLFEENPINASGVDA | BAQ51233.1 |
| | KAILSARLSKSRRLENLIAQLPGEKKNGLFGNLIALSLGLTPNFKSNFDLAEDAKLQLSKDTYDDDLDNLLAQIGDQYADLFLAAKNLSDAILLSDILRVNTEITKAPLSASMIKRYDE | [Streptococcus |
| | HHQDLTLLKALVRQQLPEKYKEIFFDQSKNGYAGYIDGGASQEEFYKFIKPILEKMDGTEELLVKLNREDLLRKQRTFDNGSIPHQIHLGELHAILRRQEDFYPFLKDNREKIEKILTF | pyogenes] |
| | RIPYYVGPLARGNSRFAWMTRKSEETITPWNFEEVVDKGASAQSFIERMTNFDKNLPNEKVLPKHSLLYEYFTVYNELTKVKYVTEGMRKPAFLSGEQKKAIVDLLFKTNRKVTVKQLK | |
| | EDYFKKIECFDSVEISGVEDRFNASLGTYHDLLKIIKDKDFLDNEENEDILEDIVLTLTLFEDREMIEERLKTYAHLFDDKVMKQLKRRRYTGWGRLSRKLINGIRDKQSGKTILDFLK | |
| | SDGFANRNFMQLIHDDSLTFKEDIQKAQVSGQGDSLHEHIANLAGSPAIKKGILQTVKVVDELVKVMGRHKPENIVIEMARENQTTQKGQKNSRERMKRIEEGIKELGSQILKEHPVEN | |
| | TQLQNEKLYLYYLQNGRDMYVDQELDINRLSDYDVDHIVPQSFLKDDSIDNKVLTRSDKNRGKSDNVPSEEVVKKMKNYWRQLLNAKLITQRKFDNLTKAERGGLSELDKAGFIKRQLV | |
| | ETRQITKHVAQILDSRMNTKYDENDKLIREVKVITLKSKLVSDFRKDFQFYKVREINNYHHAHDAYLNAVVGTALIKKYPKLESEFVYGDYKVYDVRKMIAKSEQEIGKATAKYFFYSN | |
| | IMNFFKTEITLANGEIRKRPLIETNGETGEIVWDKGRDFATVRKVLSMPQVNIVKKTEVQTGGFSKESILPKRNSDKLIARKKDWDPKKYGGFDSPTVAYSVLVVAKVEKGKSKKLKSV | |
| | KELLGITIMERSSFEKNPIDFLEAKGYKEVKKDLIIKLPKYSLFELENGRKRMLASAGELQKGNELALPSKYVNFLYLASHYEKLKGSPEDNEQKQLFVEQHKHYLDEIIEQISEFSKR | |
| | VILADANLDKVLSAYNKHRDKPIREQAENIIHLFTLTNLGAPAAFKYFDTTIDRKRYTSTKEVLDATLIHQSITGLYETRIDLSQLGGD | |
| 379 | MKKPYSIGLDIGTNSVGWAVVTDDYKVPAKKMKVLGNTDKSHIKKNLLGALLFDSGNTAEDRRLKRTTRRRYTRRRNRILYLQEIFSEEMGKVDDSFFHRLEDSFLVTEDKRGERHPIF | WP_049474547.1 |
| | GNLEEEVKYHENFPTIYHLRQYLADNPEKTDLRLVYLALAHIIKFRGHFLIEGKFDTRNNDVQRLFQEFLAVYDNTFENSSLQEQNVQVEEILTDKISKSAKKDRVLKLFPNEKSNGRF | [Streptococcus |
| | AEFLKLIVGNQADFKKHFELEEKAPLQFSKDTYEEELEVLLAQIGDNYAELFLSAKKLYDSILLSGILTVTDVSTKAPLSASMIQRYNEHQMDLTQLKQFIRQKLSDKYNEVFSDVSKD | mutans] |
| | GYAGYIDGKTNQEAFYKYLKGLLNKIEGSGYFLDKIEREDFLRKQRTFDNGSIPHQIHLQEMRAIIRRQAEFYPFLADNQDRIEKLLTFRIPYYVGPLASGKSDFAWLSRKSADKITPW | |
| | NFDEIVDKESSAEAFINRMTNYDLYLPNQKVLPKHSLLYEKFTVYNELTKVKYKTEQGKTAFFDANMKQEIFDGVFKVYRKVTKDKLMDFLEKEFDEFRIVDLTGLDKENKVFNASYGT | |
| | YHDLCKILDKDFLDNSKNEKILEDIVLTLTLFEDREMIRKRLENYSDLLTKEQVKKLERRHYTGWGRLSAELIHGIRNKESRKTILDYLIDDGNSNRNFMQLINDDALSFKEEIAKAQV | |
| | IGETDNLNQVVSDIAGSPAIKKGILQSLKIVDELVKIMGHQPENIVVEMARENQFTNQGRRNSQQRLKGLTDSIKEFGSQILKEHPVENSQLQNDRLFLYYLQNGRDMYTGEELDIDYL | |
| | SQYDIDHIIPQAFIKDNSIDNRVLTSSKENRGKSDDVPSKDVVRKMKSYWSKLLSAKLITQRKFDNLTKAERGGLTDDDKAGFIKRQLVETRQITKHVARILDERFNTETDENNKKIRQ | |
| | VKIVTLKSNLVSNFRKEFELYKVREINDYHHAHDAYLNAVIGKALLGVYPQLEPEFVYGDYPHFHGHKENKATAKKFFYSNIMNFFKKDDVRTDKNGEIIWKKDEHISNIKKVLSYPQV | |
| | NIVKKVEEQTGGFSKESILPKGNSDKLIPRKTKKFYWDTKKYGGFDSPIVAYSILVIADIEKGKSKKLKTVKALVGVTIMEKMTFERDPVAFLERKGYRNVQEENIIKLPKYSLFKLEN | |
| | GRKRLLASARELQKGNEIVLPNHLGTLLYHAKNIHKVDEPKHLDYVDKHKDEFKELLDVVSNFSKKYTLAEGNLEKIKELYAQNNGEDLKELASSFINLLTFTAIGAPATFKFFDKNID | |
| | RKRYTSTTEILKATLIHQSITGLYETRIDLSKLGGD | |
| 380 | MNKPYSIGLDIGTNSVGWSIITDDYKVPAKKMRVLGNTDKEYIKKNLIGALLFDGGNTAADRRLKRTARRRYTRRRNRILYLQEIFAEEMSKVDDSFFHRLEDSFLVEEDKRGSKYPIF | KLJ37842.1 |
| | ATLQEEKDYHEKFSTIYHLRKELADKKEKADLRLIYIALAHIIKFRGHFLIEDDSFDVRNTDISKQYQDFLEIFNTTFENNDLLSQNVDVEAILTDKISKSAKKDRILAQYPNQKSTGI | [Streptococcus |
| | FAEFLKLIVGNQADFKKYFNLEDKTPLQFAKDSYDEDLENLLGQIGDEFADLFSAAKKLYDSVLLSGILTVIDLSTKAPLSASMIQRYDEHREDLKQLKQFVKASLPEKYQEIFADSSK | agalactiae] |
| | DGYAGYIEGKTNQEAFYKYLSKLLTKQEDSENFLEKIKNEDFLRKQRTFDNGSIPHQVHLTELKAIIRRQSEYYPFLKENQDRIEKILTFRIPYYIGPLAREKSDFAWMTRKTDDSIRP | |
| | WNFEDLVDKEKSAEAFIHRMTNNDFYLPEEKVLPKHSLIYEKFTVYNELTKVRYKNEQGETYFFDSNIKQEIFDGVFKEHRKVSKKKLLDFLAKEYEEFRIVDVIGLDKENKAFNASLG | |
| | TYHDLEKILDKDFLDNPDNESILEDIVQTLTLFEDREMIKKRLENYKDLFTESQLKKLYRRHYTGWGRLSAKLINGIRDKESQKTILDYLIDDGRSNRNFMQLINDDGLSFKSIISKAQ | |
| | AGSHSDNLKEVVGELAGSPAIKKGILQSLKIVDELVKVMGYEPEQIVVEMARENQTTNQGRRNSRQRYKLLDDGVKNLASDLNGNILKEYPTDNQALQNERLFLYYLQNGRDMYTGEAL | |
| | DIDNLSQYDIDHIIPQAFIKDDSIDNRVLVSSAKNRGKSDDVPSLEIVKDCKVFWKKLLDAKLMSQRKYDNLTKAERGGLTSDDKARFIQRQLVETRQITKHVARILDERFNNELDSKG | |
| | RRIRKVKIVTVKSNLVSNFRKEFGFYKIREVNNYHHAHDAYLNAVVAKAILTKYPQLEPEFVYGDYPKYNSYKTRKSATEKLFFYSNIMNFFKTKVTLADGTVVVKDDIEVNNDTGEIV | |
| | WDKKKHFATVRKVLSYPQNNIVKKTEIQTGGFSKESILAHGNSDKLIPRKTKDIYLDPKKYGGFDSPIVAYSVLVVADIKKGKAQKLKTVTELLGITIMERSRFEKNPSAFLESKGYLN | |
| | IRADKLIILPKYSLFELENGRRRLLASAGELQKGNELALPTQFMKFLYLASRYNESKGKPEEIEKKQEFVNQHVSYFDDILQLINDFSKRVILADANLEKINKLYQDNKENISVDELAN | |
| | NIINLFTFTSLGAPAAFKFFDKIVDRKRYTSTKEVLNSTLIHQSITGLYETRIDLGKLGED | |
| 381 | MNKPYSIGLDIGTNSVGWSIITDDYKVPAKKMRVLGNTDKEYIKKNLIGALLFDGGNTAADRRLKRTARRRYTRRRNRILYLQEIFAEEMSKVDDSFFHRLEDSFLVEEDKRGSKYPIF | KLJ72361.1 |
| | ATLQEEKDYHEKFSTIYHLRKELADKKEKADLRLIYIALAHIIKFRGHFLIEDDSFDVRNTDISKQYQDFLEIFNTTFENNDLLSQNVDVEAILTDKISKSAKKDRILAQYPNQKSTGI | [Streptococcus |
| | FAEFLKLIVGNQADFKKYFNLEDKTPLQFAKDSYDEDLENLLGQIGDEFADLFSAAKKLYDSVLLSGILTVIDLSTKAPLSASMIQRYDEHREDLKQLKQFVKASLPEKYQEIFADSSK | agalactiae] |
| | DGYAGYIEGKTNQEAFYKYLSKLLTKQEDSENFLEKIKNEDFLRKQRTFDNGSIPHQVHLTELKAIIRRQSEYYPFLKENQDRIEKILTFRIPYYIGPLAREKSDFAWMTRKTDDSIRP | |
| | WNFEDLVDKEKSAEAFIHRMTNNDFYLPEEKVLPKHSLIYEKFTVYNELTKVRYKNEQGETYFFDSNIKQEIFDGVFKEHRKVSKKKLLDFLAKEYEEFRIVDVIGLDKENKAFNASLG | |
| | TYHDLEKILDKDFLDNPDNESILEDIVQTLTLFEDREMIKKRLENYKDLFTESQLKKLYRRHYTGWGRLSAKLINGIRDKESQKTILDYLIDDGRSNRNFMQLINDDGLSFKSIISKAQ | |
| | AGSHSDNLKEVVGELAGSPAIKKGILQSLKIVDELVKVMGYEPEQIVVEMARENQTTNQGRRNSRQRYKLLDDGVKNLASDLNGNILKEYPTDNQALQNERLFLYYLQNGRDMYTGEAL | |
| | DIDNLSQYDIDHIIPQAFIKDDSIDNRVLVSSAKNRGKSDDVPSLEIVKDCKVFWKKLLDAKLMSQRKYDNLTKAERGGLTSDDKARFIQRQLVETRQITKHVARILDELFNNELDSKG | |
| | RRIRKVKIVTLKSNLVSNFRKEFGFYKIREVNNYHHAHDAYLNAVVAKAILTKYPQLEPEFVYGDYPKYNSYKTRKSATEKLFFYSNIMNFFKTKVTLADGTVVVKDDIEVNNDTGEIV | |
| | WDKKKHFATVRKVLSYPQNNIVKKTEIQTGGFSKESILAHGNSDKLIPRKTKDIYLDPKKYGGFDSPIVAYSVLVVADIKKGKAQKLKTVTELLGITIMERSRFEKNPSAFLESKGYLN | |
| | IRADKLIILPKYSLFELENGRRRLLASAGELQKGNELALPTQFMKFLYLASRYNESKGKPEEIEKKQEFVNQHVSYFDDILQLINDFSKRVILADANLEKINKLYQDNKENISVDELAN | |
| | NIINLFTFTSLGAPAAFKFFDKIVDRKRYTSTKEVLNSTLIHQSITGLYETRIDLGKLGGD | |
| 382 | MNKPYSIGLDIGTNSVGWSIITDDYKVPAKKMRVLGNTDKEYIKKNLIGALLFDGGNTAADRRLKRTARRRYTRRRNRILYLQEIFAEEMSKVDDSFFHRLEDSFLVEEDKRGSKYPIF | KLL20707.1 |
| | ATLQEEKDYHEKFSTIYHLRKELADKKEKADLRLIYIALAHIIKFRGHFLIEDDSFDVRNTDISKQYQDFLEIFNTTFENNDLLSQNVDVEAILTDKISKSAKKDRILAQYPNQKSTGI | [Streptococcus |
| | FAEFLKLIVGNQADFKKYFNLEDKTPLQFAKDSYDEDLENLLGQIGDEFADLFSAAKKLYDSVLLSGILTVIDLSTKAPLSASMIQRYDEHREDLKQLKQFVKASLPEKYQEIFADSSK | agalactiae] |
| | DGYAGYIEGKTNQEAFYKYLSKLLTKQEDSENFLEKIKNEDFLRKQRTFDNGSIPHQVHLTELKAIIRRQSEYYPFLKENQDRIEKILTFRIPYYIGPLAREKSDFAWMTRKTDDSIRP | |
| | WNFEDLVDKEKSAEAFIHRMTNNDFYLPEEKVLPKHSLIYEKFTVYNELTKVRYKNEQGETYFFDSNIKQEIFDGVFKEHRKVSKKKLLDFLAKEYEEFRIVDVIGLDKENKAFNASLG | |
| | TYHDLEKILDKDFLDNPDNESILEDIVQTLTLFEDREMIKKRLENYKDLFTESQLKKLYRRHYTGWGRLSAKLINGIRDKESQKTILDYLIDDGRSNRNFMQLINDDGRSNRNFMQLIN | |
| | DDGLSFKSIISKAQAGSHSDNLKEVVGELAGSPAIKKGILQSLKIVDELVKVMGYEPEQIVVEMARENQTTNQGRRNSRQRYKLLDDGVKNLASDLNGNILKEYPTDNQALQNERLFLY | |
| | YLQNGRDMYTGEALDIDNLSQYDIDHIIPQAFIKDDSIDNRVLVSSAKNRGKSDDVPSLEIVKDCKVFWKKLLDAKLMSQRKYDNLTKAERGGLTSDDKARFIQRQLVETRQITKHVAR | |
| | ILDERFNNELDSKGRRIRKVKIVTLKSNLVSNFRKEFGFYKIREVNNYHHAHDAYLNAVVAKAILTKYPQLEPEFVYGDYPKYNSYKTRKSATEKLFFYSNIMNFFKTKVTLADGTVVV | |
| | KDDIEVNNDTGEIVWDKKKHFATVRKVLSYPQNNIVKKTEIQTGGFSKESILAHGNSDKLIPRKTKDIYLDPKKYGGFDSPIVAYSVLVVADIKKGKAQKLKTVTELLGITIMERSRFE | |
| | KNPSAFLESKGYLNIRADKLIILPKYSLFELENGRRRLLASAGELQKGNELALPTQFMKFLYLASRYNESKGKPEEIEKKQEFVNQHVSYFDDILQLINDFSKRVILADANLEKINKLY | |
| | QDNKENISVDELANNIINLFTFTSLGAPAAFKFFDKIVDRKRYTSTKEVLNSTLIHQSITGLYETRIDLGKLGED | |
| 383 | MNKPYSIGLDIGTNSVGYSVVTDDYKVPAKKMRVLGNTDKEYIKKNLIGALLFDGGNTASDRRLKRTARRRYTRRRNRILYLQEIFAEEMSKVDDSFFHRLEDSFLVEDDKRGSKYPIF | KLL42645.1 |
| | ATMQEEKDYHEKFPTIYHLRKELADKKEKANLRLVYLALAHIIKFRGHFLIEDDSFDVRNTDIQRQYQAFLEIFDTTFENNHLLSQNIDVEGILTDKISKSAKKDRILAQYPNQKSTGI | [Streptococcus |
| | FAEFLKLIVGNQADFKKHFNLEDKTPLQFAKDSYDEDLENLLGQIGDEFADLFSVAKKLYDSVLLSGILTVTDLSTKAPLSASMIQRYDEHREDLKQLKQFVKASLPEKYQEIFTDSSK | agalactiae] |
| | DGYAGYIEGKTNQGAFYKYLSKLLTKQEGSEYFLEKIKNEDFLRKQRTFDNGSIPHQVHLTELKAIIRRQSEYYPFLKENLDRIEKILTFRIPYYVGPLAREKSDFAWMTRKTDDSIRP | |
| | WNFEELVDKEASAEAFIHRMTNNDLYLPEEKVLPKHSLIYEKFTVYNELTKVRYKNEQGETYFFDSNIKQEIFDGVFKEHRKVSKKKLLDFLAKEYEEFRIVDVIGLDKENKAFNASLG | |
| | TYHDLKKILDKDFLDNPDNESILEDIVQTLTLFEDREMIKKRLENYKDLFTESQLKKLYRRHYTGWGRLSAKLINGIRDKESQKTILDYLISDGRANRNFMQLIHDDGLSFKPIIDKAQ | |
| | AGSHSDNLKEVVGELAGSPAIKKGILQSLKIVDELVKVMGYEPEQVVVEMARENQTTNKGRRNTRQRYKLLEEGVKNLASDLNGNILKEYPTDNQALQNERLFLYYLQNGRDMYTGEAL | |
| | DIDNLSQYDIDHIVPQAFIKDDSIDNRVLVSSAKNRGKSDNVPSIDIVKARKAFWKKLLDAKLMSQRKYDNLTKAERGGLTSDDKARFIQRQLVETRQITKHVARILDERFNNELDSKG | |
| | RRIRKVKIVTLKSNLVSNFRKEFGFYKIREVNDYHHAHDAYLNAVVAKAILTKYPQLEPEFVYGDYPKYNSYKTRKSATEKLFFYSNIMNFFKTKVTLADGTVVVKDDIEVNNDTGEIV | |
| | WDKKKHFATVRKVLSYPQVNIVKKTEIQTGGFSKESILAHGNSDKLIPRKTKDIYLDPKKYGGFDSPIVAYSVLVVADIKKGKAQKLKTVTELLGITIMERFRFEKNPSAFLESKGYLN | |
| | IRDDKLMILPKYSLFELENGRRRLLASAGELQKGNELALPTQYMKFLYLASRYNELKGKPEEIEQKQEFVVQHVSYFDDILQIINDFSNRVILADANLEKINKLYQDNKENISVDELAN | |
| | NIINLFTFTSLGAPAAFKFFDKIVDRKRYTSTKEVLNSTLIHQSITGLYETRIDLGKLGED | |
| 384 | MRKPYSIGLDIGTNSVGWAVITDDYKVPSKKMRIQGTTDRTSIKKNLIGALLFDNGETAEATRLKRTTRRRYTRRKYRIKELQKIFSSEMNELDIAFFPRLSESFLVSDDKEFENHPIF | AGM98575.1 |
| | GNLKDEITYHNDYPTIYHLRQTLADSDQKADLRLIYLALAHIIKFRGHFLIEGNLDSENTDVHVLFLNLVNIYNNLFEEDIVETASIDAEKILTSKTSKSRRLENLIAEIPNQKRNMLF | [Streptococcus |
| | GNLVSLALGLTPNFKTNFELLEDAKLQISKDSYEEDLDNLLAQIGDQYADLFIAAKKLSDAILLSDIITVKGASTKAPLSASMVQRYEEHQQDLALLKNLVKKQIPEKYKEIFDNKEKN | iniae SF1 |
| | GYAGYIDGKTSQEEFYKYIKPILLKLDGTEKLISKLEREDFLRKQRTFDNGSIPHQIHLNELKAIIRRQEKFYPFLKENQKKIEKLFTFKIPYYVGPLANGQSSFAWLKRQSNESITPW | |
| | NFEEVVDQEASARAFIERMTNFDTYLPEEKVLPKHSPLYEMFMVYNELTKVKYQTEGMKRPVFLSSEDKEEIVNLLFKKERKVTVKQLKEEYFSKMKCFHTVTILGVEDRFNASLGTYH | |
| | DLLKIFKDKAFLDDEANQDILEEIVWTLTLFEDQAMIERRLVKYADVFEKSVLKKLKKRHYTGWGRLSQKLINGIKDKQTGKTILGFLKDDGVANRNFMQLINDSSLDFAKIIKNEQEK | |
| | TIKNESLEETIANLAGSPAIKKGILQSIKIVDEIVKIMGQNPDNIVIEMARENQSTMQGIKNSRQRLRKLEEVHKNTGSKILKEYNVSNTQLQSDRLYLYLLQDGKDMYTGKELDYDNL | |
| | SQYDIDHIIPQSFIKDNSIDNTVLTTQASNRGKSDNVPNIETVNKMKSFWYKQLKSGAISQRKFDHLTKAERGALSDFDKAGFIKRQLVETRQITKHVAQILDSRFNSNLTEDSKSNRN | |
| | VKIITLKSKMVSDFRKDFGFYKLREVNDYHHAQDAYLNAVVGTALLKKYPKLEAEFVYGDYKHYDLAKLMIQPDSSLGKATTRMFFYSNLMNFFKKEIKLADDTIFTRPQIEVNTETGE | |
| | IVWDKVKDMQTIRKVMSYPQVNIVMKTEVQTGGFSKESIWPKGDSDKLIARKKSWDPKKYGGFDSPIIAYSVLVVAKIAKGKTQKLKTIKELVGIKIMEQDEFEKDPIAFLEKKGYQDI | |
| | QTSSIIKLPKYSLFELENGRKRLLASAKELQKGNELALPNKYVKFLYLASHYTKFTGKEEDREKKRSYVESHLYYFDVRLSQVFRVTNVEF | |
| 385 | LKLYPGEKSTGMFAQFISLIVGSKGNFQKPFDLIEKSDIECAKDSYEEDLESLLALIGDEYAELFVAAKNAYSAVVLSSIITVAETETNAKLSASMIERFDTHEEDLGELKAFIKLHLP | EFR89594.1 |
| | KHYEEIFSNTEKHGYAGYIDGKTKQADFYKYMKTTLENIEGADYFIAKIEKENFLRKQRTFDNGAIPHQLHLEELEAILHQQAKYYPFLKENYDKIKSLVTFRIPYFVGPLANGQSEFA | [Listeria innocua |
| | WLTRKADGEIRPWNIEEKVDFGKSAVDFIEKMTNKDTYLPKENVLPKHSLCYQKYLVYNELTKVRYINDQGKTSYFSGQEKEQIFNDLFKQKRKVKKKDLELFLRNMSHVESPTIEGLE | FSL S4-378] |
| | DSFNSSYSTYHDLLKVGIKQEILDNPVNTEMLENIVKILTVFEDKRMIKEQLQQFSDVLDGVVLKKLERRHYTGWGRLSAKLLMGIRDKQSHLTILDYLMNDDGLNRNLMQLINDSNLS | |
| | FKSIIEKEQVTTADKDIQSIVADLAGSPAIKKGILQSLKIVDELVSVMGYPPQTIVVEMARENQTTGKGKNNSRPRYKSLEKAIKEFGSQILKEHPTDNQELKNNRLYLYYLQNGKDMY | |
| | TGQDLDIHNLSNYDIDHIVPQSFITDNSIDNLVLTSSAGNREKGNDVPPLEIVQKRKVFWEKLYQGNLMSKRKFDYLTKAERGGLTEADKARFIHRQLVETRQITKNVANILHQRFNYG | |
| | KDDHGNTMKQVRIVTLKSALVSQFRKQFQLYKVRGVNDYHHAHDAYLNGVVANTLLKVYPQLEPEFVYGDYHQFDWFKANKATAKKQFYTNIMLFFAQKDRIIDENGEILWDKKYLDTV | |
| | KKVMSYRQMNIVKKTEIQKGEFSKATIKPKGNSSKLIPRKTNWDPMKYGGLDSPNMAYAVVIEYAKGKNKLVFEKKIIRVTIMERKAFEKDEKAFLEEQGYRQPKVLAKLPKYTLYECE | |
| | EGRRRMLASANEAQKGNQQVLPNHLVTLLHHAANCEVSDGKSLDYIESNREMFAELLAHVSEFAKRYTLAEANLNKINQLFEQNKEGDIKAIAQSFVDLMAFNAMGAPASFKFFETTIE | |
| | RKRYNNLKELLNSTIIYQSITGLYESRKRLDD | |
| 386 | MDKKYSIGLDIGTNSVGWAVITDDYKVPSKKFKVLGNTDRHSIKKNLIGALLFDSGETAEATRLKRTARRRYTRRKNRIRYLQEIFSSEMSKVDDSFFHRLEESFLVEEDKKHERHPIF | WP_049519324.1 |
| | GNIVDEVAYHEKYPTIYHLRKKLADSTDKADLRLIYLALAHMIKFRGHFLIEGDLNPDNSDVDKLFIQLVQTYNQLFEENPINASRVDAKAILSARLSKSRRLENLIAQLPGEKRNGLF | [Streptococcus |
| | GNLIALSLGLTPNFKSNFDLAEDAKLQLSKDTYDDDLDNLLAQIGDQYADLFLAAKNLSDAILLSDILRVNSEITKAPLSASMIKRYDEHHQDLTLLKALVRQQLPEKYKEIFFDQSKN | dysgalactiae] |
| | GYAGYIDGGASQEEFYKFIKPILEKMDGTEELLAKLNREDLLRKQRTFDNGSIPHQIHLGELHAILRRQEDFYPFLKDNREKIEKILTFRIPYYVGPLARGNSRFAWMTRKSEETITPW | |
| | NFEEVVDKGASAQSFIERMTNFDKNLPNEKVLPKHSLLYEYFTVYNELTKVKYVTEGMRKPAFLSGEQKKAIVDLLFKTNRKVTVKQLKEDYFKKIECFDSVEISGVEDRFNASLGTYH | |
| | DLLKIIKDKDFLDNEENEDILEDIVLTLTLFEDKEMIEERLKTYAHLFDDKVMKQLKRRHYTGWGRLSRKLINGIRDKQSGKTILDFLKSDGFANRNFIQLIHDDSLTFKEAIQKAQVS | |
| | GQGHSLHEQIANLAGSPAIKKGILQSVKVVDELVKVMGHKPENIVIEMARENQTTQKGQKNSRERMKRIEEGIKELGSQILKEHPVENTQLQNEKLYLYYLQNGRDMYVDQELDINRLS | |
| | DYDVDHIVPQSFIKDDSIDNKVLTRSDKNRGKSDNVPSEEVVKKMKNYWRQLLNAKLITQRKFDNLTKAERGGLSELDKAGFIKRQLVETRQITKHVAQILDSRMNTKYDENDKLIREV | |
| | KVITLKSKLVSDFRKDFQFYKVREINNYHHAHDAYLNAVVGTALIKKYPKLESEFVYGDYKVYDVRKMIAKSEQEIGKATAKRFFYSNIMNFFKTEITLANGEIRKRPLIETNEETGEI | |
| | VWDKGRDFATVRKVLSMPQVNIVKKTEVQTGALTNESIYARGSFDKLISRKHRFESSKYGGFGSPTVTYSVLVVAKSKVQDGKVKKIKTGKELIGITLLDKLVFEKNPLKFIEDKGYGN | |
| | VQIDKCIKLPKYSLFEFENGTRRMLASVMANNNSRGDLQKANEMFLPAKLVTLLYHAHKIESSKELEHEAYILDHYNDLYQLLSYIERFASLYVDVEKNISKVKELFSNIESYSISEIC | |
| | SSVINLLTLTASGAPADFKFLGTTIPRKRYGSPQSILSSTLIHQSITGLYETRIDLSQLGGD | |
| 387 | MDQKYSIGLDIGTNSVGWAVVTDDYKVPAKKMKVLGNTDKQSIKKNLLGALLFDSGETAEATRLKRTARRRYTRRRNRLRYLQEIFAEEMNKVDENFFQRLDDSFLVDEDKRGERHPIF | WP_049533112.1 |
| | GNIAAEVKYHDDFPTIYHLRKHLADISQKADLRLVYLALAHMIKFRGHFLIEGQLKAENTNVQALFKDFVEVYDKTVEESHLSEMTVDALSILTEKVSKSRRLENLIAHYPAEKKNTLF | [Streptococcus |
| | GNLIALSLGLQPNFKTNFQLSEDAKLQFSKDTYEEDLEGLLGEIGDEYADLFASAKNLYDAILLSGILTVDDNSTKAPLSASMVKRYEEHQKDLKKLKDFIKVNAPDQYNAIFKDKNKK | suis] |
| | GYAGYIENGVKQDEFYKYLKGILLQINGSGDFLDKIDREDFLRKQRTFDNGSIPHQIHLQEMHAILRRQEEHYPFLKENQDKIEKILTFRIPYYVGPLARKGSRFAWAEYKADEKITPW | |
| | NFDDILDKEKSAEKFITRMTLNDLYLPEEKVLPKHSLLYETFTVYNELTKVKYVNEQGEAKFFDANMKQEIFDHVFKENRKVTKDKLLNYLGKEFDEFRIVDLTGLDKENKVFNSSLGT | |
| | YHDLRKILDKSFLDNKENEQIIEDIIQTLTLFEDREMIRQRLQKYSDIFTKAQLKKLERCHYTGWGRLSYKLINGIRNKENKKTILDYLIDDGYANRNFMQLINDDALSFKEEIAKAQV | |
| | IGETDDLNQVVSDIAGSPAIKKGILQSLKIVDELVKVMGYNPANIVIEMARENQTTDKGRRNSQQRLKLLQDSLKNLDNPVNIKNVENQQLQNDRLFLYYIQNGKDMYTGETLDINNLS | |
| | QYDIDHIIPQAFIKDDSFDNRVLTSSSENRGKSDNVPSIEVVRARKADWMRLRKAGLISQRKFDNLTKAERGGLTENDKAGFIKRQLVETRQITKHVAQVLDARFNAKHDENKKVIRDV | |
| | KIITLKSNLVSQFRKDFKFYKVREINDYHHAHDAYLNAVIGTALLKKYPKLASEFVYGEFKKYDVRKFIAKSDKEIGKATAKYFFYSNLMNFFKKEVKFADGTVVERPDIETSEDGEIA | |
| | WNKQTDFKIVRKVLSYPQVNIVKKTEVQTHGLDRGKPRGLFNANPSPKPKPDSSENLVGVKRNLDPKKYGGYAGISNSYAVLVKAIIEKGVKKKETMVLEFQGISILDRITFEKDKRAF | |
| | LLGKGYKDIKKIIELPKYSLFELKDGSRRMLASILSTNNKRGEIHKGNELFVPQKFTTLLYHAKRINNPINKDHIEYVKKHRDDFKELLNYVLEFNEKYVGATKNGERLKEAVADFDSK | |
| | SNEEICTSFLGAVNSKNAGLFELTSLGSASDFEFLGVKIPRYRDYTPSSLLKDSTLIHQSITGLYETRIDLSKLGED | |
| 388 | MKKMLANIDGADYFIDQIEEENFLRKQRTFDNGTIPHQLHLEELEAILHQQAKYYPFLRKDYEKIRSLVTFRIPYFIGPLANGQSDFAWLTRKADGEIRPWNIEEKVDFGKSAIDFIEK | EFR95520.1 |
| | MTNKDTYLPKENVLPKHSLCYQKYMVYNELTKIRYIDDQGKTHHFSGQEKQQIFNGLFKQQRKVKKKDLERFLYTINHIESPTIEGVEDAFNSSFATYHDLQKGGVTQEILDNPLNADM | [Listeria |
| | LEEIVKILTVFEDKRMIKEQLQSFSDVLDGTILKKLERRHYTGWGRLSAKLLTGIRDKHSHLTILDYLMNDDGLNRNLMQLINDSNLSFKSIIEKEQVSTADKGIQSIVAELAGSPAIK | ivanovii FSL F6- |
| | KGILQSLKIVDELVGIMGYPPQTIVVEMARENQTTGKGKNNSKPRFISLEKAIKEFGSQILKEHPTDNQCLKNDRLYLYYLQNGKDMYTGKELDIHNLSNYDIDHIIPQSFITDNSIDN | 596] |
| | KVREVNDYHHAHDAYLNGVVANTLLKVYPQLEPEFVYGDYHQFDWFKANKATAKKQFYTNIMRFFAKENQIIDKNGEILWDNRYLDTIKKVLSYRQMNIVKKTEIQKGEFSNATVNPKG | |
| | NSSKLISRKADWNPIKYGGFDGSNMAYSIVIEYEKRKKKTVIKKELIQINIMERVAFEKDQKAFLEEKGYYSPKVLTKIPKYTLYECENGRRRMLGSANEAQKGNQMVLPNHLMTLLYH | |
| | AKNCEANDGESLAYIEMHREMFAELLAYISEFAKRYTLANDRLEKINMFFEQNKKGDIKVIAKSFDKLKVFNAFGAPRDFEFFETTIKRKRYYNIKELLNATIIYQSITGLYEARKRLE | |
| | D | |
| 389 | MKKPYSIGLDIGTNSVGWAVVTDDYKVPAKKMKVLGNTDKSHIKKNLLGALLFDSGNTAADRRLKRTARRRYTRRRNRILYLQEIFAEEMSKVDDSFFHRLEDSFLVTEDKRGERHPIF | WP_049473442.1 |
| | GNLEEEVKYYENFPTIYHLRQYLADNPEKVDLRLVYLALAHIIKFRGHFLIEGKFDTRNNDVQRLFQEFLAVYDNTFENSSLQEQNVQVEEILTDKISKSAKKDRVLKLFPNEKSNGRF | [Streptococcus |
| | AEFLKLIVGNQADFKKHFELEEKAPLQFSKDTYEEDLEELLGKIGDDYADLFTLAKNLYDAILLSGILTADDSSTKAPLSASMIQRYNEHQMDLAQLKQFIRQKLSDKYNEVFSDVSKD | mutans] |
| | GYAGYIDGKTNQEAFYKYLKGLLNKIEGSGYFLDKIEREDFLRKQRTFDNGSIPHQIHLQEMRAIIRRQAEFYPFLADNQDRIEKILTFRIPYYVGPLARGKSDFAWLSRKSADKITPW | |
| | NFDEIVDKESSAEAFINRMTNYDLYLPNQKVLPKHSLLYEKFTVYNELTKVKYKTEQGKTAFFDANMKQEIFDGVFKVYRKVTKDKLMDFLEKEFDEFRIVDLTGLDKENKVFNASYGT | |
| | YHDLCKILDKDFLDNSKNEKILEDIVLTLTLFEDREMIRKRLENYSDLLTKEQVKKLERRHYTGWGRLSAELIHGIRNKESRKTILDYLIDDGNSNRNFMQLINDDALSFKEEIAKAQV | |
| | IGETDNLNQVVSDIAGSPAIKKGILQSLKIVDELVKIMGHQPENIVVEMARENQFTNQGRRNSQQRLKGLTDSIKEFGSQILKEHPVENSQLQNDRLFLYYLQNGRDMYTGEELDIDYL | |
| | SQYDIDHIIPQAFIKDNSIDNRVLTSSKENRGKSDDVPSKDVVRKMKPYWSKLLSAKLITQRKFDNLTKAERGGLTDDDKAGFIKRQLVETRQITKHVARILDERFNTETDENNKKIRQ | |
| | VKIVTLKSNLVSNFRKEFELYKVREINDYHHAHDAYLNAVIGKALLGVYPQLEPEFVYGDYPHFHGHEENKATAKKFFYSNIMNFFKKDDVRTDKNGEIIWKKDEHISNIKKVLSYPQV | |
| | NIVKKVEEQTGGFSKESILPKGNSDKLIPRKTKKFYWDTKKYGGFDSPIVAYSILVIADIEKGKSKKLKTVKALVGVTIMEKMTFERDPVAFLERKGYRNVQEENIIKLPKYSLFKLEN | |
| | GRKRLLASARELQKGNEIVLPNHLGTLLYHAKNIHKVDEPKHLDYVDKHKDEFKELLDVVSNFSKKYTLAEGNLEKIKELYAQNNGEDLKELASSFINLLTFTAIGAPATFKFFDKNID | |
| | RKRYTSTTEILNATLIHQSITGLYETRIDLSKLGGD | |
| 390 | MKKPYSIGLDIGTNSVGWAVVTDDYKVPAKKMKVLGNTDKSHIKKNLLGALLFDSGNTAEDRRLKRTARRRYTRRRNRILYLQEIFSEEMGKVDDSFFHRLEDSFLVTEDKRGERHPIF | ALF27331.1 |
| | GNLEEEVKYHENFPTIYHLRQYLADNPEKTDLRLVYLALAHIIKFRGHFLIEGKFDTRNNDVQRLFQEFLAVYDNTFENSSLQEQNVQVEEILTDKISKSAKKDRVLKLFPNEKSNGRF | [Streptococcus |
| | AEFLKLIVGNQADFKKHFELEEKAPLQFSKDTYEEELEVLLAQIEDNYAELFLSAKKLYDSILLSGILTVTDVSTKAPLSASMIQRYNEHQMDLAQLKQFIRQKLSDKYNEVFSDVSKD | intermedius] |
| | GYAGYIDGKTNQEAFYKYLKGLLNKIEGSGYFLDKIEREDFLRKQRTFDNGSIPHQIHLQEMRAIIRRQAEFYPFLADNQDRIEKILTFRIPYYIGPLARGKSDFSWLSRKSADKITPW | |
| | NFDEIVDKESSAEAFINRMTNYDLYLPNQKVLPRHSLLYEKFTVYNELTKVKYKTEQGKTAFFDANMKQEIFDGVFKVYRKVTKDKLMDFLEKEFDEFRIVDLTGLDKENKAFNASYGT | |
| | YHDLRKILDKDFLDNSKNEKILEDIVLTLTLFEDREMIRKRLENYSDLLTKEQVKNLERRHYTGWGRLSAELIHGIRNKESRKTILDYLIDDGNSNRNFMQLINDDALSFKEEIAKAQV | |
| | IGETDNLNQVVSDIAGSPAIKKGILQSLKIVDELVKIMGHQPENIVVEMARENQFTNQGRRNSQQRLKGLTDSIKEFGSQILKEHPVENSQLQNDRLFLYYLQNGRDMYTGEELDIDYL | |
| | SQYDIDHIIPQAFIKDNSIDNRVLTSSKENRGKSDDVPSKDVVRKMKSYWSKLLSAKLITQRKFDNLTKAERGGLTDDDKAGFIKRQLVETRQITKHVARILDERFNTETDENNKKIRQ | |
| | VKIVTLKSNLVSNFRKEFELYKVREINDYHHAHDAYLNAVIGKALLGVYPQLEPEFVYGDYPHFHGHKENKATAKKFFYSNIMNFFKKDDVRTDKNGEIIWKKDEHISNIKKVLSYPQV | |
| | NIVKKVEEQTGGFSKESILPKGNSDKLIPRKTKKFYWDTKKYGGFDSPIVAYSILVIANIEKGKSKKLKLVKDLVGITIMERTIFEKNPVAFLERKGYRNVQEENIVKLPKYSLFELEN | |
| | GRRRLLASARELQKGNEIVLPNHLGTMLYHAKNIHKVDEPKHLDYVKKHKDEFKELLDVVSNFSKKNILAESNLEKIEELYAQNNNKDITELASSFINLLTFTAIGAPAAFKFFDNNID | |
| | RKRYTSTTEILNATLIHQSITGLYETRIDLSRLGGD | |
| 391 | MKNMKKPYTIGLDIGTNSVGWAVLTDQYDLVKRKMKIAGDSEKKQIKKNFWGVRLFDEGQTAADRRMARTARRRIERRRNRISYLQGIFAEEMSKTDANFFCRLSDSFYVDNEKRNSRH | EHN60060.1 |
| | PFFATIEEEVEYHKNYPTIYHLREELVNSSEKADLRLVYLALAHIIKYRGNFLIEGALDTQNTSVDGIYKQFIQTYNQVFASGIEDGSLKKLEDNKDVAKILVEKVTRKEKLERILKLY | [Listeria innocua |
| | PGEKSAGMFAQFISLIVGSKGNFQKPFDLIEKSDIECAKDSYEEDLESLLALIGDEYAELFVAAKNAYSAVVLSSIITVAETETNAKLSASMIERFDTHEEDLGELKAFIKLHLPKHYE | ATCC 33091] |
| | EIFSNTEKHGYAGYIDGKTKQADFYKYMKMTLENIEGADYFIAKIEKENFLRKQRTFDNGAIPHQLHLEELEAILHQQAKYYPFLKENYDKIKSLVTFRIPYFVGPLANGQSEFAWLTR | |
| | KADGEIRPWNIEEKVDFGKSAVDFIEKMTNKDTYLPKENVLPKHSLCYQKYLVYNELTKVRYINDQGKTSYFSGQEKEQIFNDLFKQKRKVKKKDLELFLRNMSHVESPTIEGLEDSFN | |
| | SSYSTYHDLLKVGIKQEILDNPVNTEMLENIVKILTVFEDKRMIKEQLQQFSDVLDGVVLKKLERRHYTGWGRLSAKLLMGIRDKQSHLTILDYLMNDDGLNRNLMQLINDSNLSFKSI | |
| | IEKEQVTTADKDIQSIVADLAGSPAIKKGILQSLKIVDELVSVMGYPPQTIVVEMARENQTTGKGKNNSRPRYKSLEKAIKEFGSQILKEHPTDNQELRNNRLYLYYLQNGKDMYTGQD | |
| | LDIHNLSNYDIDHIVPQSFITDNSIDNLVLTSSAGNREKGDDVPPLEIVRKRKVFWEKLYQGNLMSKRKFDYLTKAERGGLTEADKARFIHRQLVETRQITKNVANILHQRFNYEKDDH | |
| | GNTMKQVRIVTLKSALVSQFRKQFQLYKVRDVNDYHHAHDAYLNGVVANTLLKVYPQLEPEFVYGDYHQFDWFKANKATAKKQFYTNIMLFFAQKDRIIDENGEILWDKKYLDTVKKVM | |
| | SYRQMNIVKKTEIQKGEFSKATIKPKGNSSKLISRKTNWDPMKYGGLDSPNMAYAVVIEYAKGKNKLVFEKKIIRVTIMERKAFEKDEKAFLEEQGYRQPKVLAKLPKYTLYECEEGRR | |
| | RMLASANEAQKGNQQVLPNHLVTLLHHVANCEVSDGKSLDYIESNREMFAELLAHVSEFAKRYTLAEANLNKINQLFEQNKEGDIKAIAQSFVDLMAFNAMGAPASFKFFETTIERKRY | |
| | NNLKELLNSTIIYQSITGLYESRKRLDD | |
| 392 | MNKPYSIGLDIGTNSVGWSIITDDYKVPAKKMRVLGNTDKEYIKKNLIGALLFDGGNTAADRRLKRTARRRYTRRRNRILYLQEIFAEEMSKVDDSFFHRLEDSFLVEEDKRGSKYPIF | AHN30376.1 |
| | ATMQEEKDYHEKFPTIYHLRKELADKKEKADLRLVYLALAHIIKFRGHFLIEDDRFDVRNTDIQKQYQAFLEIFDTSFENNHLLSQNVDVEAILTDKISKSAKKDRILAQYPNQKSTGI | [Streptococcus |
| | FAEFLKLIVGNQADFKKHFNLEDKTPLQFAKDSYDEDLENLLGQIGDEFADLFSAAKKLYDSVLLSGILTVTDLSTKAPLSASMIQRYDEHREDLKQLKQFVKASLPEKYQEIFADSSK | agalactiae 138P] |
| | DGYAGYIEGKTNQEAFYKYLSKLLTKQEDSEYFLEKIKNEDFLRKQRTFDNGSIPHQVHLTELKAIIRRQSEYYPFLKENQDKIEKILTFRIPYYVGPLARGNSDFAWMTRKTDDSIRP | |
| | WNFEDLVDKEKSAEAFIHRMTNNDLYLPEEKVLPKHSLIYEKFTVYNELTKVRYKNEQGETYFFDSNVKQEIFDGVFKEHRKVSKKQLLDFLAKEFEEFRIVDVTGLDKENKAFNASLG | |
| | TYHDLKKILDKDFLDNPDNESILEDIVQTITLFEDREMIKKRLENYKDLFTESQLKKLYRRHYTGWGRLSAKLINGIRDRESQKIILDYLISDGRANRNFMQLINDDGLSFKSIISKAQ | |
| | SGSHSDNLKEVVGELAGSPAIKKGILQSLKIVDELVKVMGYEPEQIVVEMARENQTTNQGRRNSRQRYKLLEDGVKNLASDLNGDILKEYPTDNQALQNERLFLYYLQNGRDMYTGEAL | |
| | DIDSLSQYDIDHIVPQAFIKDDSIDNRVLVSSAKNRGKSDDVPSIDIVKARKAFWKKLLDAKLISQRKYDNLTKAERGGLTPDDKAGFIQRQLVETRQITKHVARILDERFNNKVDDNN | |
| | KPIRKVKIVTLKSNLVSNFRKEFGFYKIREVNNYHHAHDAYLNAVVAKAILTKYPQLEPEFVYGDYPKYNSYKTRKSATEKLFFYSNIMNFFKTKVTLADETVVVKDDIEVNNETGEIA | |
| | WDKKKHFATVRKVLSYPQVNIVKKTEVQTGGFSKESILAHSNSDKLIPRKTKDIYLDPKKYGGFDSPIVAYSVLVLADIKKGKAQKLKTVKELIGITIMERERFEKNPSAFLESKGYLN | |
| | IRTDKLIILPKYSLFELENGRRRLLASAGELQKGNELALPTQYMKFLYLASRYNESKGKPEEIEKKQEFVNQHVSYFDDILQLINDFSKRVILADANLEKINKLYSDNKDNTPVDELAK | |
| | NIINLFTFTSLGAPAAFKFFDKSVDRKRYTSTKEVLDSTLIHQSITGLYETRIDLGKLGED | |
| 393 | MRKPYSIGLDIGTNSVGWAVITDDYKVPSKKMRIQGTTDRTSIKKNLIGALLFDNGETAEATRLKRTTRRRYTRRKYRIKELQKIFSSEMNELDIAFFPRLSESFLVSDDKEFENHPIF | AHY15608.1 |
| | GNLKDEITYHNDYPTIYHLRQTLADSDQKADLRLIYLALAHIIKFRGHFLIEGNLDSENTDVHVLFLNLVNIYNNLFEEDIVETASIDAEKILTSKTSKSRRLENLIAEIPNQKRNMLF | [Streptococcus |
| | GNLVSLALGLTPNFKTNFELLEDAKLQISKDSYEEDLDNLLAQIGDQYADLFIAAKKLSDAILLSDIITVKGASTKAPLSASMVQRYEEHQQDLALLKNLVKKQIPEKYKEIFDNKEKN | iniae] |
| | GYAGYIDGKTSQEEFYKYIKPILLKLDGTEKLISKLEREDFLRKQRTFDNGSIPHQIHLNELKAIIRRQEKFYPFLKENQKKIEKLFTFKIPYYVGPLANGQSSFAWLKRQSNESITPW | |
| | NFEEVVDQEASARAFIERMTNFDTYLPEEKVLPKHSPLYEMFMVYNELTKVKYQTEGMKRPVFLSSEDKEEIVNLLFKKERKVTVKQLKEEYFSKMKCFHTVTILGVEDRFNASLGTYH | |
| | DLLKIFKDKAFLDDEANQDILEEIVWTLTLFEDQAMIERRLVKYADVFEKSVLKKLKKRHYTGWGRLSQKLINGIKDKQTGKTILGFLKDDGVANRNFMQLINDSSLDFAKIIKNEQEK | |
| | TIKNESLEETIANLAGSPAIKKGILQSIKIVDEIVKIMGQNPDNIVIEMARENQSTMQGIKNSRQRLRKLEEVHKNTGSKILKEYNVSNTQLQSDRLYLYLLQDGKDMYTGKELDYDNL | |
| | SQYDIDHIIPQSFIKDNSIDNTVLTTQASNRGKSDNVPNIETVNKMKSFWYKQLKSGAISQRKFDHLTKAERGALSDFDKAGFIKRQLVETRQITKHVAQILDSRFNSNLTEDSKSNRN | |
| | VKIITLKSKMVSDFRKDFGFYKLREVNDYHHAQDAYLNAVVGTALLKKYPKLEAEFVYGDYKHYDLAKLMIQPDSSLGKATTRMFFYSNLMNFFKKEIKLADDTIFTRPQIEVNTETGE | |
| | IVWDKVKDMQTIRKVMSYPQVNIVMKTEVQTGGFSKESIWPKGDSDKLIARKKSWDPKKYGGFDSPIIAYSVLVVAKIAKGKTQKLKTIKELVGIKIMEQDEFEKDPIAFLEKKGYQDI | |
| | QTSSIIKLPKYSLFELENGRKRLLASAKELQKGNELALPNKYVKFLYLASHYTKFTGKEEDREKKRSYVESHLYYFXEVKSSF | |
| 394 | MRKPYSIGLDIGTNSVGWAVITDDYKVPSKKMRIQGTTDRTSIKKNLIGALLFDNGETAEATRLKRTTRRRYTRRKYRIKELQKIFSSEMNELDIAFFPRLSESFLVSDDKEFENHPIF | AHY17476.1 |
| | GNLKDEITYHNDYPTIYHLRQTLADSDQKADLRLIYLALAHIIKFRGHFLIEGNLDSENTDVHVLFLNLVNIYNNLFEEDIVETASIDAEKILTSKTSKSRRLENLIAEIPNQKRNMLF | [Streptococcus |
| | GNLVSLALGLTPNFKTNFELLEDAKLQISKDSYEEDLDNLLAQIGDQYADLFIAAKKLSDAILLSDIITVKGASTKAPLSASMVQRYEEHQQDLALLKNLVKKQIPEKYKEIFDNKEKN | iniae] |
| | GYAGYIDGKTSQEEFYKYIKPILLKLDGTEKLISKLEREDFLRKQRTFDNGSIPHQIHLNELKAIIRRQEKFYPFLKENQKKIEKLFTFKIPYYVGPLANGQSSFAWLKRQSNESITPW | |
| | NFEEVVDQEASARAFIERMTNFDTYLPEEKVLPKHSPLYEMFMVYNELTKVKYQTEGMKRPVFLSSEDKEEIVNLLFKKERKVTVKQLKEEYFSKMKCFHTVTILGVEDRFNASLGTYH | |
| | DLLKIFKDKAFLDDEANQDILEEIVWTLTLFEDQAMIERRLVKYADVFEKSVLKKLKKRHYTGWGRLSQKLINGIKDKQTGKTILGFLKDDGVANRNFMQLINDSSLDFAKIIKNEQEK | |
| | TIKNESLEETIANLAGSPAIKKGILQSIKIVDEIVKIMGQNPDNIVIEMARENQSTMQGIKNSRQRLRKLEEVHKNTGSKILKEYNVSNTQLQSDRLYLYLLQDGKDMYTGKELDYDNL | |
| | SQYDIDHIIPQSFIKDNSIDNTVLTTQASNRGKSDNVPNIETVNKMKSFWYKQLKSGAISQRKFDHLTKAERGALSDFDKAGFIKRQLVETRQITKHVAQILDSRFNSNLTEDSKSNRN | |
| | VKIITLKSKMVSDFRKDFGFYKLREVNDYHHAQDAYLNAVVGTALLKKYPKLEAEFVYGDYKHYDLAKLMIQPDSSLGKATTRMFFYSNLMNFFKKEIKLADDTIFTRPQIEVNTETGE | |
| | IVWDKVKDMQTIRKVMSYPQVNIVMKTEVQTGGFSKESIWPKGDSDKLIARKKSWDPKKYGGFDSPIIAYSVLVVAKIAKGKTQKLKTIKELVGIKIMEQDEFEKDPIAFLEKKGYQDI | |
| | QTSSIIKLPKYSLFELENGRKRLLASAKELQKGNELALPNKYVKFLYLASHYTKFTGKEEDREKKRSYVESHLYXFX | |
| 395 | IETNGETGEIVWDKGRDFATVRKVLSMPQVNIVKKTEVQTGGFSKESILPKRNSDKLIARKKDWDPKKYGGFDSPTVAYSVLVVAKVEKGKSKKLKSVKELLGITIMERSSFEKDPIDF | KGE60856.1 |
| | LEAKGYKEVRKDLIIKLPKYSLFELENGRKRMLASAGELQKGNELALPSKYVNFLYLASHYEKLKGSPEDNEQKQLFVEQHKHYLDEIIEQISEFSKRVILADANLDKVLSAYNKHRDK | [Streptococcus |
| | PIREQAENIIHLFTLTNLGAPAAFKYFDTTIDRKRYTSTKEVLDATLIHQSITGLYETRIDLSQLGGD | pyogenes SS1447] |
| 396 | MDEEAKIQLSKESYEEELESLLEKSGEEFRDVFLQAKKVYDAILLSDILSTKKQNSKAKLSLGMIERYDSHKKDLEELKQFVKANLPEKTAIFFKDSSKNGYAGYIDGKTTQEDFYKFL | EM575795.1 |
| | KKELNGIAGSERFMEKVDQENFLLKQRTTANGVIPHQVHLTELKAIIERQKPYYPSLEEARDKMIRLLTFRIPYYVGPLAQGEETSSFAWLERKTPEKVTPWNATEVIDYSASAMKFIQ | [Enterococcus |
| | RMINYDTYLPTEKVLPKHSILYQKYTIFNELTKVAYKDERGIKHQFSSKEKREIFKELFQKQRKVTVKKLQQFLSANYNIEDAEILGVDKAFNSSYATYHDFLDLAKPNTERVAELLEQ | durans IPLA 655] |
| | PEMNAMFEDIVKILTIFEDREMIRTQLKKYQSVLGDGFFKKLVKKHYTGWGRLSERLINGIRDKKTNKTILDYLIDDDDFPYNRNRNFMQLINDDSLSFKEELANELALAGNQSLLEVV | |
| | EALLGSPAIKKGIWQTLKIVEELIETIGYNPKNIVVEMARENQRTNRSKPRLKALEEALKSFDSPLLKEQPVDNQALQKDRLYLYYLQNGKDMYTGEALDIDRLSEYDIDHIIPRSFIV | |
| | DNSIDNKVLVSSKENRLKMDDVPDQKVVIRMRRYWEKLLRANLISERKFAYLTKLELTPEDKARFIQRQLVETRQITKHVAAILDQYFNQPEESKNKGIRIITLKSSLVSQFRKTFGIN | |
| | KVREINNHHHAHDAYLNGVVAIALLKKYPKLEPEFVYGNYTKFNLATENKATAKKEFYSNILRFFEKEEYSYDENGEIFWDKARHIPQIKKVISSHQVNIVKKVEVQTGGFYKETVNPK | |
| | GKPDKLIQRKAGWDVSKYGGFGSPVVAYAVAFIYEKGKARKKAKAIEGITIMKQSLFEQDPIGFLSNKGYSNVTKFIKLSKYTLYELENGRRRMVASHKEAQKANSFILPEKLVTLLYH | |
| | AQHYDEIAHKESFDYVNDHLSEFREILDQVIDFSNRYTIAAKNTEKIAELFEQNQESTVQSLSQSFINLMQLNAMGAPADFKFFDVIIPRKRYPSLTEIWESTIIYQSITGLRETRTRM | |
| | ATLWDGEQ | |
| 397 | MDLIGTNSVGWAVVTDDYKVPAKKMKVLGNTDKSHIKKNLLGALLFDSGNTAADRRLKRTARRRYTRRRNRILYLQEIFAEEMSKVDDSFFHRLEDSFLVTEDKRGERHPIFGNLEEEV | EMC03581.1 |
| | KYHENFPTIYHLRQYLADNPEKVDLRLVYLALAHIIKFRGHFLIEGKFDTRNNDVQRLFQEFLAVYDNTFENSSLQEQNVQVEEILTDKISKSAKKDRVLKLFPNEKSNGRFAEFLKLI | [Streptococcus |
| | VGNQADFKKHFELEEKAPLQFSKDTYEEELEVLLAQIGDNYAELFLSAKKLYDSILLSGILTVTDVSTKAPLSASMIQRYNEHQMDLAQLKQFIRQKLSDKYNEVFSDVSKDGYAGYID | mutans NLML4] |
| | GKTNQEAFYKYLKGLLNKIEGSGYFLDKIEREDFLRKQRTFDNGSIPHQIHLQEMRAIIRRQAEFYPFLADNQDRIEKILTFRIPYYVGPLARGKSDFAWLSRKSADKITPWNFDEIVD | |
| | KESSAEAFINRMTNYDLYLPNQKVLPKHSLLYEKFTVYNELTKVKYKTEQGKTAFFDANMKQEIFDGVFKVYRKVTKDKLMDFLEKEFDEFRIVDLTGLDKENKAFNASYGTYHDLRKI | |
| | LDKDFLDNSKNEKILEDIVLTLTLFEDREMIRKRLENYSDLLTKEQVKKLERRHYTGWGRLSAELIHGIRNKESRKTILDYLIDDGNSNRNFMQLINDDALSFKEEIAKAQVIGETDNL | |
| | NQVVSDIAGSPAIKKGILQSLKIVDELVKIMGHQPENIVVEMARENQFTNQGRRNSQQRLKGLTDSIKEFGSQILKEHPVEHSQLQNDRLFLYYLQNGRDMYTGEELDIDYLSQYDIDH | |
| | IIPQAFIKDNSIDNRVLTSSKENRGKSDDVPSKNVVRKMKSYWSKLLSAKLITQRKFDNLTKAERGGLTDDDKAGFIKRQLVETRQITKHVARILDERFHTETDENNKKIRQVKIVTLK | |
| | SNLVSNFRKEFELYKVREINDYHHAHDAYLNAVIGKALLGVYPQLEPEFVYGDYPHFHGHKENKATAKKFFYSNIMNFFKKDDVRTDKNGEIIWKKDEHISNIKKVLSYPQVNIVKKVE | |
| | EQTGGFSKESILPKGNSDKLIPRKTKKFYWDTKKYGGFDSPIVAYSILVIADIEKGKSKKLKTVKALVGVTIMEKMTFERDPVAFLERKGYRNVQEENIIKLPKYSLFKLENGRKRLLA | |
| | SARELQKGNEIVLPNHLGTLLYHAKNIHKVDEPKHLDYVDKHKDEFKELLDVVSNFSKKYTLAEGNLEKIKELYAQNNGEDLKELASSFINLLTFTAIGAPATFKFFDKNIDRKRYTST | |
| | TEILNATLIHQSITGLYETRIDLSKLGGD | |
| 398 | MEQDEFEKDPIAFLEKKGYQDIQTSSIIKLPKYSLFELENGRKRLLASAKELQKGNELALPNKYVKFLYLASHYTKFTGKEEDREKKRSYVESHLYYFDEIMQIIVEYSNRYILADSNL | E5R09100.1 |
| | IKIQNLYKEKDNFSIEEQAINMLNLFTFTDLGAPSAFKFFNGDIDRKRYSSTNEIINSTLIYQSPTGLYETRIDLSKLGGK | [Streptococcus |
| | | iniae IUSA1] |
| 399 | MKKEYSIGLDIGTNSVGWAVITDDYKVPAKKMKVLGNTDKQSIKKNLLGALLFDSGETAEATRLKRTARRRYTRRKNRLRYLQEIFTEEMNKVDENFFQRLDDSFLVEEDKQGSKYPIF | GAD46167.1 |
| | GTLKEEKEYHKKFKTIYHLREELANSKEKADLRLVYLALAHMIKFRGHFLYEGDLKAENTDVQALFKDFVEEYDKTIEESHLSEITVDALSILTEKVSKSSRLENLIAHYPTEKKNTLF | [Streptococcus |
| | GNLIALSLGLQPNFKTNFQLSEDAKLQFSKDTYEEDLEELLGEIGDEYADLFASAKNLYDAILLSGILAVDDNTTKAPLSASMVKRYEEHQKDLKKLKDFIKVNAPDQYNAIFKDKNKK | anginosus T5] |
| | GYAGYIESGVEQDEFYKYLKGILLKINGSGDFLDKIDCEDFLRKQRTFDNGSIPHQIHLQEMHAILRRQGEHYPFLKENQDKIEKILTFRIPYYVGPLARKGSRFAWAEYKADEKITPW | |
| | NFDDILDKEKSAEKFITRMTLNDLYLPEEKVLPKHSPLYETFTVYNELTKVKYVNEQGEAKFFDTNMKQEIFDHVFKENRKVTKDKLLNYLNKEFEEFRIVNLTGLDKENKAFNSSLGT | |
| | YHDLRKILDKSFLDDKANEKTIEDIIQTLTLFEDREMIRQRLQKYSDIFTKAQLKKLERRHYTGWGRLSYKLINGIRNKENKKTILDYLIDDGYANRNFMQLINDDALSFKEEIARAQI | |
| | IGDVDDIANVVHDLPGSPAIKKGILQSVKIVDELVKVMGHNPANIIIEMARENQTTDKGRRNSQQRLKLLQDSLKNLDNPVNIKNVENQQLQNDRLFLYYIQNGKDMYTGETLDINNLS | |
| | QYDIDHIIPQAFIKDNSLDNRVLTRSDKNRGKSDDVPSIEVVHEMKSFWSKLLSVKLITQRKFDNLTKAERGGLTEEDKAGFIKRQLVETRQITKHVAQILDERFNTEFDGAQRRIRNV | |
| | KIITLKSNLVSNFRKEFELYKVREINDYHHAHDAYLNAVVGNALLLKYPQLEPEFVYGEYPKYNSYRSRKSATEKFLFYSNILRFFKKEDIQTNEDGEIAWNKEKHIKILRKVLSYPQV | |
| | NIVKKTEEQTGGFSKESILPKGESDKLIPRKTKNSYWNPKKYGGFDSPVVAYSILVFADVEKGKSKKLRKVQDMVGITIMEKKRFEKNPVDFLEQRGYRNVRLEKIIKLPKYSLFELEN | |
| | KRRRLLASARELQKGNELVIPQRFTTLLYHSYQIEKNYEPEHREYVEKHKDEFKELLEYISVFSRKYVLADNNLTKIEMLFSKNKDAEVSSLAKSFISLLTFTAFGAPAAFNFFGENID | |
| | RKRYTSVTECLNATLIHQSITGLYETRIDLSKLGED | |
| 400 | MTKKEQPYNIGLDIGTGSVGWAVTNDNYDLLNIKKKNLWGVRLFEGAQTAKETRLNRSTRRRYRRRKNRINWLNEIFSEELANTDPSFLIRLQNSWVSKKDPDRKRDKYNLFIDNPYTD | AKP02966.1 |
| | KEYYREFPTIFHLRKELIINKNKADIRLVYLALHNILKYRGNFTYEHQKFNISTLNSNLSKELIELNQQLIKYDISFPDNCDWNHISDILIGRGNATQKSSNILNNFTLDKETKKLLKE | [Lactobacillus |
| | VINLILGNVAHLNTIFKTSLTKDEEKLSFSGKDIESKLDDLDSILDDDQFTVLDTANRIYSTITLNEILNGESYFSMAKVNQYENHAIDLCKLRDMWHTTKNEKAVGLSRQAYDDYINK | farciminis] |
| | PKYGTKELYTSLKKFLKVALPTNLAKEAEEKISKGTYLVKPRNSENGVVPYQLNKIEMEKIIDNQSQYYPFLKENKEKLLSILSFRIPYYVGPLQSSEKNPFAWMERKSNGHARPWNFD | |
| | EIVDREKSSNKFIRRMTVTDSYLVGEPVLPKNSLIYQRYEVLNELNNIRITENLKTNPTGSRLTVETKQHIYNELFKNYKKITVKKLTKWLIAQGYYKNPILIGLSQKDEFNSTLTTYL | |
| | DMKKIFGSSFMENNKNYNQIEELIEWLTIFEDKQILNEKLHSSNYSYTSDQIKKISNMRYKGWGRLSKKILTCITTETNTPKSLQLSNYSVLDLMWTTNNNFISIISNDKYDFKNYIEN | |
| | HNLNKNEDQNISNLVNDIHVSPALKRGITQSIKIVQEIVKFMGHAPKYIFIEVTRETKK [symbol] QRLQSKLLNKANGFKPQLRKYLVPNEKIQEELKKHKNDLSSERIMLYFL | |
| | QNGKSLYSEESLNINKLSDYQVDHILPRTYIPDDSLENKALVLAKENQRKADDLLLNSNVIDKNLERWTYMLNNNMMGLKKFKNLTRRVITDKDKLGFIHRQLVQTSQMVKGVANILNS | |
| | MYKNQGTTCIQARANLSTAFRKALSDQDDRYHFKHPELVKNRNINDFHHAQDAYLASFLGTYRLRRFPTDEMLLMNGEYNKFYGQVKELYSKKKKLPDSRKNGFIISPLVNGTTQYDRN | |
| | TGEIIWNVGFRDKILKIFNYHQCNVTRKTEIKTGQFYDQTIYSPKNPKYKKLIAQKKDMDPNIYGGFSGDNKSSITIVKIDNNKIKPVAIPIRLINDLKDKKTLQNWLEENVKHKKSIQ | |
| | IIKNNVPIGQIIYSKKVGLLSLNSDREIANRQQLILPPEHSALLRILQIPDEDPDQILAFYDKNILVEILQELITKMKKFYPFYKNEQEFLASNIENFNQATTSEKINSLEELITLLHA | |
| | NSTSAHLIFNNIEKKAFGRKTHGLTLNDTDFIYQSVTGLYETRIHIE | |
| 401 | QELDINRLSGYDVDHIVPQSFLKDDSIDNKVLTRSDKNRGKSDNVPSEEVVKKMKNYWRQLLNAKLITQRKFDNLTKAERGGLSELDKVGFIKRQLVETRQITKHVAQILDSRMNTKYD | KGE60162.1 |
| | ENDKLIREVRVITLKSKLVSDFRKDFQFYKVREINNYHHAHDAYLNAVVGTALIKKYPKLESEFVYGDYKVYDVRKMIAKSEQEIGKATAKYFFYSNIMNFFKTEITLANGEIRKRPLI | [Streptococcus |
| | ETNGETGEIVWDKGRDFATVRKVLSMPQVNIVKKTEVQTGGFSKESILPKRNSDKLIARKKDWDPKKYGGFDSPTVAYSVLVVAKVEKGKSKKLKSVKELLGITIMERSSFEKDPIDFL | pyogenes |
| | EAKGYKEVRKDLIIKLPKYSLFELENGRKRMLASAGELQKGNELALPSKYVNFLYLASHYEKLKGSPEDNEQKQLFVEQHKHYLDEIIEQISEFSKRVILADANLDKVLSAYNKHRDKP | MGAS2111] |
| | IREQAENIIHLFTLTNLGAPAAFKYFDTTIDRKRYTSTKEVLDATLIHQSITGLYETRIDLSQLGGD | |
| 402 | MSQNIVDYCIGLDLGTGSVGWAVVDMNHRLMKRNGKHLWGSRLFSNAETAATRRSSRSIRRRYNKRRERIRLLRAILQDMVLEKDPTFFIRLEHTSFLDEEDKAKYLGTDYKDNYNLFI | CUO82355.1 |
| | DEDFNDYTYYHKYPTIYHLRKALCESTEKADPRLIYLALHHIVKYRGNFLYEGQKFNMDASNIEDKLSDVFTQFADFNNIPYEDDEKKNLEILEILKKPLSKKAKVDEVMALISPEKEF | [Roseburia |
| | KSAYKELVTGIAGNKMNVTKMILCESIKQGDSEIKLKFSDSNYDDQFSEVENDLGEYVEFIDSLHNIYSWVELQTIMGATHTDNASISEAMVSRYNKHHEDLQLLKKCIKDNVPKKYFD | hominis] |
| | MFRNDSEKVKGYYNYINRPNKAPVDEFYKFVKKCIEKVDTPEAKQILHDIELENFLLKQNSRTNGSVPYQMQLDEMIKIIDNQAKYYPVLKEKREQLLSILTFRIPYYFGPLNETSEHA | |
| | WIKRLEGKENQRILPWNYQDTVDVDATAEGFIKRMRSYCTYFPDEEVLPKNSLIVSKYEVYNELNKIRVDDKLLEVDVKNDIYNELFMKNKTVTEKKLKNWLVNNQCCRKDAEIKGFQK | |
| | ENQFSTSLTPWIDFTNIFGKIDQSNFDLIEKIIYDLTVFEDKKIMKRRLKKKYALPDDKIKQILKLKYKDWSRLSKKLLDGIVADNRFGSSVTVLDVLEMSRLNLMEIINDKELGYAQM | |
| | IEEASSCPKDGKFTYEEVAKLAGSPALKRGIWQSLQIVEEITKVMKCRPKYIYIEFERSEEAKERTESKIKKLENVYKDLDEQTKKEYKSVLEELKGFDNTKKISSDSLFLYFTQLGKC | |
| | MYSGKKLDIDSLDKYQIDHIVPQSLVKDDSFDNRVLVLPSENQRKLDDLVVPFDIRDKMYRFWKLLFDHELISPKKFYSLIKTEYTERDEERFINRQLVETRQITKNVTQIIEDHYSTT | |
| | KVAAIRANLSHEFRVKNHIYKNRDINDYHHAHDAYIVALIGGFMRDRYPNMHDSKAVYSEYMKMFRKNKNDQKKWKDGFVINSMNYPYEVDGKLIWNPDLINEIKKCFYYKDCYCTTKL | |
| | DQKSGQMFNLTVLPNDAHSAKGTTEAVIPVNKNRKDVNKYGGFSGLQYVIAAIEGTKKKGKKLVKVRKLSGIPLYLKQADIKEQIEYVEKEEKLSDVKIIKNNIPLNQLIEIDGRQYLL | |
| | TSPTECVNAMQLVLNEEQCKLIADIYNAIYKQDFDGLDNMLMIQLYLQLIDKLKTLYPIYMGIVEKFEKLTEDFVSISKEEKANVIKQMLIIMHKGPQNGNITYDDFNVGKRIGRLNGR | |
| | TFYLDNIEFISQSPTGIYTKKYKL | |
| 403 | MKYKIGLDIGITSIGWAVINLDIPRIEDLGVRIFDRAENPKTGESLALPRRLARSARRRLRRRKHRLERIRRLFVREGILTKEELNKLFEKKHEIDVWQLRVEALDRKLNNDELARILL | Cas9 [Geobacillus |
| | HLAKRRGFRSNRKSERTNKENSTMLKHIEENQSILSSYRTVAEMVVKDPKFSLHKRNKEDNYTNTVARDDLEREIKLIFAKQREYGNIVCTEAFEHEYISIWASQRPFASKDDIEKKVG | thermodenitrificans] |
| | FCTFEPKEKRAPKATYTFQSFTVWEHINKLRLVSPGGIRALTDDERRLIYKQAFHKNKITFHDVRTLLNLPDDTRFKGLLYDRNTTLKENEKVRFLELGAYHKIRKAIDSVYGKGAAKS | |
| | FRPIDFDTFGYALTMFKDDTDIRSYLRNEYEQNGKRMENLADKVYDEELIEELLNLSFSKFGHLSLKALRNILPYMEQGEVYSTACERAGYTFTGPKKKQKTVLLPNIPPIANPVVMRA | |
| | LTQARKVVNAIIKKYGSPVSIHIELARELSQSFDERRKMQKEQEGNRKKNETAIRQLVEYGLTLNPTGLDIVKFKLWSEQNGKCAYSLQPIEIERLLEPGYTEVDHVIPYSRSLDDSYT | |
| | NKVLVLTKENREKGNRTPAEYLGLGSERWQQFETFVLTNKQFSKKKRDRLLRLHYDENEENEFKNRNLNDTRYISRFLANFIREHLKFADSDDKQKVYTVNGRITAHLRSRWNFNKNRE | |
| | ESNLHHAVDAAIVACTTPSDIARVTAFYQRREQNKELSKKTDPQFPQPWPHFADELQARLSKNPKESIKALNLGNYDNEKLESLQPVFVSRMPKRSITGAAHQETLRRYIGIDERSGKI | |
| | QTVVKKKLSEIQLDKTGHFPMYGKESDPRTYEAIRQRLLEHNNDPKKAFQEPLYKPKKNGELGPIIRTIKIIDTTNQVIPLNDGKTVAYNSNIVRVDVFEKDGKYYCVPIYTIDMMKGI | |
| | LPNKAIEPNKPYSEWKEMTEDYTFRFSLYPNDLIRIEFPREKTIKTAVGEEIKIKDLFAYYQTIDSSNGGLSLVSHDNNFSLRSIGSRTLKRFEKYQVDVLGNIYKVRGEKRVGVASSS | |
| | HSKAGETIRPL | |
| 404 | KRNYILGLDIGITSVGYGIIDYETRDVIDAGVRLFKEANVENNEGRRSKRGARRLKRRRRHRIQRVKKLLFDYNLLTDHSELSGINPYEARVKGLSQKLSEEEFSAALLHLAKRRGVHN | Cas9 [Staph. |
| | VNEVEEDTGNELSTKEQISRNSKALEEKYVAELQLERLKKDGEVRGSINRFKTSDYVKEAKQLLKVQKAYHQLDQSFIDTYIDLLETRRTYYEGPGEGSPFGWKDIKEWYEMLMGHCTY | Aureus] |
| | FPEELRSVKYAYNADLYNALNDLNNLVITRDENEKLEYYEKFQIIENVFKQKKKPTLKQIAKEILVNEEDIKGYRVTSTGKPEFTNLKVYHDIKDITARKEIIENAELLDQIAKILTIY | |
| | QSSEDIQEELTNLNSELTQEEIEQISNLKGYTGTHNLSLKAINLILDELWHTNDNQIAIFNRLKLVPKKVDLSQQKEIPTTLVDDFILSPVVKRSFIQSIKVINAIIKKYGLPNDIIIE | |
| | LAREKNSKDAQKMINEMQKRNRQTNERIEEIIRTTGKENAKYLIEKIKLHDMQEGKCLYSLEAIPLEDLLNNPFNYEVDHIIPRSVSFDNSFNNKVLVKQEENSKKGNRTPFQYLSSSD | |
| | SKISYETFKKHILNLAKGKGRISKTKKEYLLEERDINRFSVQKDFINRNLVDTRYATRGLMNLLRSYFRVNNLDVKVKSINGGFTSFLRRKWKFKKERNKGYKHHAEDALIIANADFIF | |
| | KEWKKLDKAKKVMENQMFEEKQAESMPEIETEQEYKEIFITPHQIKHIKDFKDYKYSHRVDKKPNRELINDTLYSTRKDDKGNTLIVNNLNGLYDKDNDKLKKLINKSPEKLLMYHHDP | |
| | QTYQKLKLIMEQYGDEKNPLYKYYEETGNYLTKYSKKDNGPVIKKIKYYGNKLNAHLDITDDYPNSRNKVVKLSLKPYRFDVYLDNGVYKFVTVKNLDVIKKENYYEVNSKCYEEAKKL | |
| | KKISNQAEFIASFYNNDLIKINGELYRVIGVNNDLLNRIEVNMIDITYREYLENMNDKRPPRIIKTIASKTQSIKKYSTDILGNLYEVKSKKHPQIIKKG | |
| 405 | (His-X-Glu-X23-26-Pro-Cys-X2-4-Cys | Zn2+-coordinating |
| | | motif |

[symbol]

indicates data missing or illegible when filed

### EQUIVALENTS AND SCOPE

[0553] Those skilled in the art will recognize, or be able to ascertain using no more than routine experimentation, many equivalents of the embodiments described herein. The scope of the present disclosure is not intended to be limited to the above description, but rather is as set forth in the appended claims.

[0554] Articles such as “a,” “an,” and “the” may mean one or more than one unless indicated to the contrary or otherwise evident from the context. Claims or descriptions that include “or” between two or more members of a group are considered satisfied if one, more than one, or all of the group members are present, unless indicated to the contrary or otherwise evident from the context. The disclosure of a group that includes “or” between two or more group members provides embodiments in which exactly one member of the group is present, embodiments in which more than one members of the group are present, and embodiments in which all of the group members are present. For purposes of brevity those embodiments have not been individually spelled out herein, but it will be understood that each of these embodiments is provided herein and may be specifically claimed or disclaimed.

[0555] It is to be understood that the invention encompasses all variations, combinations, and permutations in which one or more limitation, element, clause, or descriptive term, from one or more of the claims or from one or more relevant portion of the description, is introduced into another claim. For example, a claim that is dependent on another claim can be modified to include one or more of the limitations found in any other claim that is dependent on the same base claim. Furthermore, where the claims recite a composition, it is to be understood that methods of making or using the composition according to any of the methods of making or using disclosed herein or according to methods known in the art, if any, are included, unless otherwise indicated or unless it would be evident to one of ordinary skill in the art that a contradiction or inconsistency would arise.

[0556] Where elements are presented as lists, e.g., in Markush group format, it is to be understood that every possible subgroup of the elements is also disclosed, and that any element or subgroup of elements can be removed from the group. It is also noted that the term “comprising” is intended to be open and permits the inclusion of additional elements or steps. It should be understood that, in general, where an embodiment, product, or method is referred to as comprising particular elements, features, or steps, embodiments, products, or methods that consist, or consist essentially of, such elements, features, or steps, are provided as well. For purposes of brevity those embodiments have not been individually spelled out herein, but it will be understood that each of these embodiments is provided herein and may be specifically claimed or disclaimed.

[0557] Where ranges are given, endpoints are included. Furthermore, it is to be understood that unless otherwise indicated or otherwise evident from the context and/or the understanding of one of ordinary skill in the art, values that are expressed as ranges can assume any specific value within the stated ranges in some embodiments, to the tenth of the unit of the lower limit of the range, unless the context clearly dictates otherwise. For purposes of brevity, the values in each range have not been individually spelled out herein, but it will be understood that each of these values is provided herein and may be specifically claimed or disclaimed. It is also to be understood that unless otherwise indicated or otherwise evident from the context and/or the understanding of one of ordinary skill in the art, values expressed as ranges can assume any subrange within the given range, wherein the endpoints of the subrange are expressed to the same degree of accuracy as the tenth of the unit of the lower limit of the range.

[0558] In addition, it is to be understood that any particular embodiment of the present invention may be explicitly excluded from any one or more of the claims. Where ranges are given, any value within the range may explicitly be excluded from any one or more of the claims. Any embodiment, element, feature, application, or aspect of the compositions and/or methods of the invention, can be excluded from any one or more claims. For purposes of brevity, all of the embodiments in which one or more elements, features, purposes, or aspects is excluded are not set forth explicitly herein.

What is claimed is:

1. A Cas9 protein comprising an amino acid sequence that is at least 80% identical to the amino acid sequence of a Cas9 as provided by any one of SEQ ID NO: 2, wherein the amino acid sequence of the Cas9 protein comprises at least one, at least two, at least three, at least four, at least five, at least six, at least seven, at least eight, or at least nine mutations in an amino acid residue selected from the group consisting of amino acid residues 10, 177, 218, 322, 367, 409, 427, 589, 599, 614, 630, 631, 654, 673, 693, 710, 715, 727, 743, 753, 757, 758, 762, 763, 768, 803, 859, 861, 865, 869, 921, 946, 1016, 1021, 1028, 1054, 1077, 1080, 1114, 1134, 1135, 1137, 1139, 1151, 1180, 1188, 1211, 1219, 1221, 1223, 1256, 1264, 1274, 1290, 1318, 1317, 1320, 1323, and 1333 of the amino acid sequence provided in SEQ ID NO: 2.

2. The Cas9 protein of claim 1, wherein the amino acid sequence of the Cas9 protein comprises at least one, at least two, at least three, at least four, at least five, at least six, at least seven, at least eight, or at least nine mutations selected from the group consisting of X10T, X177N, X218R, X322V, X367T, X409I, X427G, X589S, X599R, X614N, X630K, X631A, X654L, X673E, X693L, X710E, X715C, X727I, X743I, X753G, X757K, X758H, X762G, X763I, X768H, X803S, X859S, X861N, X865G, X869S, X921P, X946D, X1016D, X1021T, X1028D, X1054D, X1077D, X1080S, X1114G, X1134L, X1135N, X1137S, X1139A, X1151E, X1180G, X1188R, X1211R, X1219V, X1221H, X1223S, X1256R, X1264Y, X1274R, X1290G, X1318S, X1317T, X1320V, X1323D, and X1333K of the amino acid sequence provided in SEQ ID NO: 2, wherein X represents any amino acid.

3. The Cas9 protein of claim 1 or 2, wherein the amino acid sequence of the Cas9 protein comprises at least one, at least two, at least three, at least four, at least five, at least six, at least seven, at least eight, or at least nine mutations selected from the group consisting of A10T, D177N, K218R, I322V, A367T, S409I, E427G, A589S, K599R, D614N, E630K, M631A, R654L, K673E, F693L, K710E, G715C, L727I, V743I, R753G, E757K, N758H, E762G, M763I, Q768H, N803S, R859S, D861N, G865G, N869S, L921P, N946D, Y1016D, M1021T, E1028D, N1054D, G1077D, F1080S, R1114G, F1134L, D1135N, P1137S, V1139A, K1151E, D1180G, K1188R, K1211R, E1219V, Q1221H, G1223S, Q1256R, H1264Y, S1274R, V1290G, L1318S, N1317T, A1320V, A1323D, and R1333K of the amino acid sequence provided in SEQ ID NO:2, wherein X is any amino acid.

4. A Cas9 protein comprising an amino acid sequence that is at least 80% identical to the amino acid sequence of a Cas9 as provided by SEQ ID NO: 2, wherein the amino acid sequence of the Cas9 protein comprises at least one, at least two, at least three, at least four, at least five, at least six, at least seven, at least eight, or at least nine mutations in an amino acid residue selected from the group consisting of amino acid residues 10, 177, 218, 322, 367, 427, 589, 599, 614, 630, 631, 693, 710, 743, 753, 757, 758, 762, 768, 803, 859, 861, 865, 869, 921, 946, 1016, 1021, 1028, 1054, 1077, 1080, 1114, 1134, 1135, 1137, 1151, 1180, 1188, 1211, 1221, 1223, 1274, 1290, 1317, 1320, 1323, and 1333 of the amino acid sequence provided in SEQ ID NO: 2.

5. The Cas9 protein of claim 4, wherein the amino acid sequence of the Cas9 protein comprises at least one, at least two, at least three, at least four, at least five, at least six, at least seven, at least eight, or at least nine mutations selected from the group consisting of X10T, X177N, X218R, X322V, X367T, X427G, X589S, X599R, X614N, X630K, X631A, X693L, X710E, X743I, X753G, X757K, X758H, X762G, X768H, X803S, X859S, X861N, X865G, X869S, X921P, X946D, X1016D, X1021T, X1028D, X1054D, X1077D, X1080S, X1114G, X1134L, X1135N, X1137S, X1151E, X1180G, X1188R, X1211R, X1221H, X1223S, X1274R, X1290G, X1317T, X1320V, X1323D, and X1333K of the amino acid sequence provided in SEQ ID NO: 2, wherein X represents any amino acid.

6. The Cas9 protein of claim 4 or 5, wherein the amino acid sequence of the Cas9 protein comprises at least one, at least two, at least three, at least four, at least five, at least six, at least seven, at least eight, or at least nine mutations selected from the group consisting of A10T, D177N, K218R, I322V, A367T, E427G, A589S, K599R, D614N, E630K, M631A, F693L, K710E, V743I, R753G, E757K, N758H, E762G, Q768H, N803S, R859S, D861N, N869S, L921P, N946D, Y1016D, M1021T, E1028D, N1054D, G1077D, F1080S, R1114G, F1134L, D1135N, P1137S, K1151E, D1180G, K1188R, K1211R, Q1221H, G1223S, S1274R, V1290G, N1317T, A1320V, A1323D, and R1333K of the amino acid sequence provided in SEQ ID NO: 2, wherein X represents any amino acid.

7. The Cas9 protein of any one of claims 1-6, wherein the Cas9 protein comprises the combination of mutations of any one of the Cas9 clones listed in Table 1, or a combination of conservative mutations thereto.

8. The Cas9 protein of any one of claims 1-7, wherein the Cas9 protein comprises the combination of mutations of any one of the Cas9 clones listed in Table 1.

9. The Cas9 protein of any one of claims 1-8, wherein the Cas9 protein comprises the combination of mutations of any one of the Cas9 clones selected from the group consisting of N3.19.4c-3; N3.19.4c-4; P4.2-72-4; P4.2-72-5; P10.6.144.2; P10.5.192.7; P10.5.192.10; P10.6.144.5; P10.6.192.1; P10.6.192.9; P10.6.192.12; P13.2-8; P13.3-3; P13.4-3; P16.2-120-1; P16.2-120-2; P16.2-120-3; P16.2-120-4; P16.2-120-5; P16.2-120-6; P16.1-3; P16.3-2; P16.4-5(es); and P16.6-2, or a combination of conservative mutations thereto.

10. The Cas9 protein of any one of claims 1-9, wherein the Cas9 protein comprises the combination of mutations of any one of the Cas9 clones selected from the group consisting of N3.19.4c-3; N3.19.4c-4; P4.2-72-4; P4.2-72-5; P10.6.144.2; P10.5.192.7; P10.5.192.10; P10.6.144.5; P10.6.192.1; P10.6.192.9; P10.6.192.12; P13.2-8; P13.3-3; P13.4-3; P16.2-120-1; P16.2-120-2; P16.2-120-3; P16.2-120-4; P16.2-120-5; P16.2-120-6; P16.1-3; P16.3-2; P16.4-5(es); and P16.6-2.

11. The Cas9 protein of any one of claims clim 1-10 comprising an amino acid sequence that is at least 85%, at least 90%, at least 92%, at least 95%, at least 96%, at least 97%, at least 98%, at least 99%, or at least 99.5% identical to the amino acid sequence of a Cas9 as provided by SEQ ID NOs: 2.

12. The Cas9 protein of any one of claims 1-11, wherein the Cas9 exhibits an increased activity on a target sequence that does not comprise the canonical PAM (5′-NGG-3′) at its 3′ end as compared to Streptococcus pyogenes Cas9 as provided by SEQ ID NO: 2.

13. The Cas9 protein of any one of claims 1-12, wherein the Cas9 protein exhibits an activity on a target sequence having a 3′ end that is not directly adjacent to the canonical PAM sequence (5′-NGG-3′) that is at least 5-fold, at least 10-fold, at least 50-fold, at least 100-fold, at least 500-fold, at least 1,000-fold, at least 5,000-fold, at least 10,000-fold, at least 50,000-fold, at least 100,000-fold, at least 500,000-fold, or at least 1,000,000-fold increased as compared to the activity of Streptococcus pyogenes Cas9 as provided by SEQ ID NO: 2 on the same target sequence.

14. The Cas9 protein of claim 12 or 13, wherein the 3′ end of the target sequence is directly adjacent to an AAA, GAA, CAA, or TAA sequence.

15. The Cas9 protein of any one of claims 12-14, wherein the activity is measured by a nuclease assay, a deamination assay, or a transcriptional activation assay.

16. The Cas9 protein of any one of claims 1-15, wherein the Cas9 protein comprises a D10A and/or a H840A mutation of the amino acid sequence provided in SEQ ID NO: 2.

17. A Cas9 protein comprising an amino acid sequence that is at least 80% identical to the amino acid sequence of a Cas9 as provided by SEQ ID NO: 2, wherein the amino acid sequence of the Cas9 protein comprises at least one, at least two, at least three, at least four, at least five, at least six, at least seven, at least eight, or at least nine mutations in an amino acid residue selected from the group consisting of amino acid residues 472, 562, 565, 570, 570, 589, 608, 625, 627, 629, 630, 631, 638, 647, 652, 653, 654, 670, 673, 676, 687, 703, 710, 711, 716, 740, 742, 752, 753, 767, 771, 775, 789, 790, 795, 797, 803, 804, 808, 848, 866, 875, 890, 922, 928, 948, 959, 990, 995, 1014, 1015, 1016, 1021, 1030, 1036, 1055, 1057, 1114, 1127, 1135, 1156, 1177, 1180, 1184, 1207, 1219, 1234, 1246, 1251, 1252, 1286, 1301, 1332, 1335, 1337, 1338, 1348, 1349, 1365, 1367, and 1368 of the amino acid sequence provided in SEQ ID NO: 2.

18. The Cas9 protein of claim 1, wherein the amino acid sequence of the Cas9 protein comprises at least one, at least two, at least three, at least four, at least five, at least six, at least seven, at least eight, or at least nine mutations selected from the group consisting of X472I, X562F, X565D, X570T, X570S, X589V, X608R, X625S, X627K, X629G, X630G, X631I, X631V, X638P, X647A, X647I, X652T, X653K, X654L, X654I, X654H, X670T, X673E, X676G, X687R, X703P, X710E, X711T, X716R, X740A, X742E, X752R, X753G, X767D, X771H, X775R, X789E, X790A, X795L, X797N, X803S, X804A, X808D, X848N, X866R, X875I, X890E, X890N, X922A, X928T, X948E, X959N, X990S, X995S, X1014N, X1015A, X1016C, X1016S, X1021L, X1030R, X1036H, X1036D, X1055E, X1057S, X1057T, X1114G, X1127A, X1127G, X1135N, X1156E, X1156N, X1177S, X1180E, X1184T, X1207G, X1219V, X1234D, X1246E, X1251G, X1252D, X1286H, X1301S, X1332N, X1332G, X1335Q, X1337N, X1338T, X1348V, X1349R, X1365L, X1367E, X1367T, X1367fs?, and X1368D of the amino acid sequence provided in SEQ ID NO: 2, wherein X represents any amino acid.

19. The Cas9 protein of claim 17 or 18, wherein the amino acid sequence of the Cas9 protein comprises at least one, at least two, at least three, at least four, at least five, at least six, at least seven, at least eight, or at least nine mutations selected from the group consisting of T472I, I562F, V565D, I570T, I570S, A589V, K608R, L625S, E627K, R629G, E630G, M631I, M631V, T638P, V647A, V647I, K652T, R653K, R654L, R654I, R654H, I670T, K673E, G676G, G687R, T703P, K710E, A711T, Q716R, T740A, K742E, G752R, R753G, N767D, Q771H, K775R, K789E, E790A, I795L, K797N, N803S, T804A, N808D, K848N, K866R, V875I, K890E, K890N, V922A, K948E, K959N, N990S, T995S, K1014N, V1015A, Y1016C, Y1016S, M1021L, G1030R, Y1036H, Y1036D, 11055E, 11057S, 11057T, R1114G, D1127A, D1127G, D1135N, K1156E, K1156N, N1177S, D1180E, A1184T, E1207G, E1219V, N1234D, K1246E, D1251G, N1252D, N1286H, P1301S, D1332N, D1332G, R1335Q, T1337N, S1338T, 11348V, H1349R, L1365L, G1367E, G1367T, G1367fs?, and D1368D of the amino acid sequence provided in SEQ ID NO: 2, wherein X is any amino acid.

20. A Cas9 protein comprising an amino acid sequence that is at least 80% identical to the amino acid sequence of a Cas9 as provided by any one of SEQ ID NO: 2, wherein the amino acid sequence of the Cas9 protein comprises at least one, at least two, at least three, at least four, at least five, at least six, at least seven, at least eight, or at least nine mutations in an amino acid residue selected from the group consisting of amino acid residues 472, 562, 565, 570, 570, 589, 608, 625, 627, 629, 630, 631, 638, 647, 647, 652, 653, 654, 654, 654, 670, 676, 687, 703, 710, 716, 740, 742, 752, 753, 767, 771, 775, 789, 790, 795, 797, 803, 804, 808, 848, 866, 875, 890, 890, 922, 948, 959, 990, 995, 1014, 1015, 1016, 1016, 1021, 1030, 1036, 1036, 1055, 1057, 1057, 1114, 1127, 1135, 1156, 1156, 1177, 1180, 1184, 1234, 1246, 1251, 1252, 1286, 1301, 1332, 1332, 1335, 1338, 1348, 1349, 1367, 1367, 1367, and 1368 of the amino acid sequence provided in SEQ ID NO: 2.

21. The Cas9 protein of claim 20, wherein the amino acid sequence of the Cas9 protein comprises at least one, at least two, at least three, at least four, at least five, at least six, at least seven, at least eight, or at least nine mutations selected from the group consisting of X472I, X562F, X565D, X570T, X570S, X589V, X608R, X625S, X627K, X629G, X630G, X631I, X631V, X638P, X647A, X647I, X652T, X653K, X654L, X654I, X654H, X670T, X676G, X687R, X703P, X710E, X716R, X740A, X742E, X752R, X753G, X767D, X771H, X775R, X789E, X790A, X795L, X797N, X803S, X804A, X808D, X848N, X866R, X875I, X890E, X890N, X922A, X948E, X959N, X990S, X995S, X1014N, X1015A, X1016C, X1016S, X1021L, X1030R, X1036H, X1036D, X1055E, X1057S, X1057T, X1114G, X1127A, X1127G, X1135N, X1156E, X1156N, X1177S, X1180E, X1184T, X1234D, X1246E, X1251G, X1252D, X1286H, X1301S, X1332N, X1332G, X1335Q, X1338T, X1348V, X1349R, X1367E, X1367T, X1367fs?, and X1368D of the amino acid sequence provided in SEQ ID NO: 2, wherein X represents any amino acid.

22. The Cas9 protein of claim 20 or 21, wherein the amino acid sequence of the Cas9 protein comprises at least one, at least two, at least three, at least four, at least five, at least six, at least seven, at least eight, or at least nine mutations selected from the group consisting of T472I, I562F, V565D, I570T, I570S, A589V, K608R, L625S, E627K, R629G, E630G, M631I, M631V, T638P, V647A, V647I, K652T, R653K, R654L, R654I, R654H, I670T, G676G, G687R, T703P, K710E, Q716R, T740A, K742E, G752R, R753G, N767D, Q771H, K775R, K789E, E790A, I795L, K797N, N803S, T804A, N808D, K848N, K866R, V875I, K890E, K890N, V922A, K948E, K959N, N990S, T995S, K1014N, V1015A, Y1016C, Y1016S, M1021L, G1030R, Y1036H, Y1036D, I1055E, I1057S, I1057T, R1114G, D1127A, D1127G, D1135N, K1156E, K1156N, N1177S, D1180E, A1184T, N1234D, K1246E, D1251G, N1252D, N1286H, P1301S, D1332N, D1332G, R1335Q, S1338T, I1348V, S1349R, G1367E, G1367T, G1367fs?, and D1368D of the amino acid sequence provided in SEQ ID NO: 2, wherein X represents any amino acid.

23. The Cas9 protein of any one of claims 17-22, wherein the Cas9 protein comprises the combination of mutations of any one of the Cas9 clones listed in Table 2, or a combination of conservative mutations thereto.

24. The Cas9 protein of any one of claims 17-23, wherein the Cas9 protein comprises the combination of mutations of any one of the Cas9 clones listed in Table 2.

25. The Cas9 protein of any one of claims 17-24, wherein the Cas9 protein comprises the combination of mutations of any one of the Cas9 clones selected from the group consisting of N4.CAC-1; N4.CAC-5; N4.CAC06; SacB.CAC.4h; N3.CAC-1; N3.CAC-5; N3.CAC-6; N3.CAC-8; P15.1.166-3; P15.1.166-8; P15.2.166-2; P15.3.166-4; P15.3.166-5; P15.3.166-7; P15.4.166-4; P15.4.166-8; P17.1.144-1; P17.1.144-2; P17.1.144-3; P17.1.144-4; P17.1.144-5; P17.1.144-7; P17.1.144-8; P17.2.144-1; P17.2.144-2; P17.2.144-3; P17.2.144-4; P17.2.144-5; P17.2.144-6; P17.2.144-7; P17.2.144-8; P17.1-1; P17.1-5; and P17.1.7-4(fn), or a combination of conservative mutations thereto.

26. The Cas9 protein of any one of claims 17-25, wherein the Cas9 protein comprises the combination of mutations of any one of the Cas9 clones selected from the group consisting of N4.CAC-1; N4.CAC-5; N4.CAC06; SacB.CAC.4h; N3.CAC-1; N3.CAC-5; N3.CAC-6; N3.CAC-8; P15.1.166-3; P15.1.166-8; P15.2.166-2; P15.3.166-4; P15.3.166-5; P15.3.166-7; P15.4.166-4; P15.4.166-8; P17.1.144-1; P17.1.144-2; P17.1.144-3; P17.1.144-4; P17.1.144-5; P17.1.144-7; P17.1.144-8; P17.2.144-1; P17.2.144-2; P17.2.144-3; P17.2.144-4; P17.2.144-5; P17.2.144-6; P17.2.144-7; P17.2.144-8; P17.1-1; P17.1-5; and P17.1.7-4(fn).

27. The Cas9 protein of any one of claims claim 17-26 comprising an amino acid sequence that is at least 85%, at least 90%, at least 92%, at least 95%, at least 96%, at least 97%, at least 98%, at least 99%, or at least 99.5% identical to the amino acid sequence of a Cas9 as provided by SEQ ID NO: 2.

28. The Cas9 protein of any one of claims 17-27, wherein the Cas9 exhibits an increased activity on a target sequence that does not comprise the canonical PAM (5′-NGG-3′) at its 3′ end as compared to Streptococcus pyogenes Cas9 as provided by SEQ ID NO: 2.

29. The Cas9 protein of any one of claims 17-28, wherein the Cas9 protein exhibits an activity on a target sequence having a 3′ end that is not directly adjacent to the canonical PAM sequence (5′-NGG-3′) that is at least 5-fold, at least 10-fold, at least 50-fold, at least 100-fold, at least 500-fold, at least 1,000-fold, at least 5,000-fold, at least 10,000-fold, at least 50,000-fold, at least 100,000-fold, at least 500,000-fold, or at least 1,000,000-fold increased as compared to the activity of Streptococcus pyogenes Cas9 as provided by SEQ ID NO: 2 on the same target sequence.

30. The Cas9 protein of claim 28 or 29, wherein the 3′ end of the target sequence is directly adjacent to an AAC, GAC, CAC, or TAC sequence.

31. The Cas9 protein of any one of claims 28-30, wherein the activity is measured by a nuclease assay, a deamination assay, or a transcriptional activation assay.

32. The Cas9 protein of any one of claims 17-31, wherein the Cas9 protein comprises a D10A and/or a H840A mutation of the amino acid sequence provided in SEQ ID NO: 2.

33. A Cas9 protein comprising an amino acid sequence that is at least 80% identical to the amino acid sequence of a Cas9 as provided by SEQ ID NOs: 2, wherein the amino acid sequence of the Cas9 protein comprises at least one, at least two, at least three, at least four, at least five, at least six, at least seven, at least eight, or at least nine mutations in an amino acid residue selected from the group consisting of amino acid residues 575, 596, 631, 649, 654, 664, 710, 740, 743, 748, 750, 753, 765, 790, 797, 853, 922, 955, 961, 985, 1012, 1049, 1057, 1114, 1131, 1135, 1150, 1156, 1162, 1180, 1191, 1218, 1219, 1221, 1227, 1249, 1253, 1256, 1286, 1293, 1308, 1317, 1320, 1321, 1332, 1335, and 1339 of the amino acid sequence provided in SEQ ID NO: 2.

34. The Cas9 protein of claim 33, wherein the amino acid sequence of the Cas9 protein comprises at least one, at least two, at least three, at least four, at least five, at least six, at least seven, at least eight, or at least nine mutations selected from the group consisting of X575S, X596Y, X631L, X649R, X654L, X664K, X710E, X740A, X743I, X748I, X750A, X753G, X765X, X790A, X797E, X853E, X922A, X955L, X961E, X985Y, X1012A, X1049G, X1057V, X1114G, X1131C, X1135N, X1150V, X1156E, X1162A, X1180G, X1180A, X1191N, X1218S, X1219V, X1221H, X1227V, X1249S, X1253K, X1256R, X1286K, X1293T, X1308D, X1317K, X1320V, X1321S, X1332G, X1335L, and X1339I of the amino acid sequence provided in SEQ ID NO: 2 wherein X represents any amino acid.

35. The Cas9 protein of claim 33 or 34, wherein the amino acid sequence of the Cas9 protein comprises at least one, at least two, at least three, at least four, at least five, at least six, at least seven, at least eight, or at least nine mutations selected from the group consisting of F575S, D596Y, M631L, K649R, R654L, R664K, K710E, T740A, V743I, V748I, V750A, R753G, R765X, E790A, K797E, D853E, V922A, V955L, K961E, H985Y, D1012A, E1049G, 11057V, R1114G, Y1131C, D1135N, E1150V, K1156E, E1162A, D1180G, D1180A, K1191N, G1218S, E1219V, Q1221H, A1227V, P1249S, E1253K, Q1256R, N1286K, A1293T, N1308D, N1317K, A1320V, P1321S, D1332G, R1335L, and T1339I of the amino acid sequence provided in SEQ ID NO: 2 wherein X is any amino acid.

36. A Cas9 protein comprising an amino acid sequence that is at least 80% identical to the amino acid sequence of a Cas9 as provided by SEQ ID NO: 2 werein the amino acid sequence of the Cas9 protein comprises at least one, at least two, at least three, at least four, at least five, at least six, at least seven, at least eight, or at least nine mutations in an amino acid residue selected from the group consisting of amino acid residues 575, 596, 631, 649, 664, 710, 740, 743, 748, 750, 753, 765, 790, 797, 853, 922, 961, 985, 1012, 1049, 1057, 1114, 1131, 1135, 1150, 1156, 1162, 1180, 1191, 1218, 1221, 1249, 1253, 1286, 1293, 1308, 1317, 1320, 1321, 1332, 1335, and 1339 of the amino acid sequence provided in SEQ ID NO: 2.

37. The Cas9 protein of claim 36, wherein the amino acid sequence of the Cas9 protein comprises at least one, at least two, at least three, at least four, at least five, at least six, at least seven, at least eight, or at least nine mutations selected from the group consisting of X575S, X596Y, X631L, X649R, X664K, X710E, X740A, X743I, X748I, X750A, X753G, X765X, X790A, X797E, X853E, X922A, X961E, X985Y, X1012A, X1049G, X1057V, X1114G, X1131C, X1135N, X1150V, X1156E, X1162A, X1180G, X1180A, X1191N, X1218S, X1221H, X1249S, X1253K, X1286K, X1293T, X1308D, X1317K, X1320V, X1321S, X1332G, X1335L, and X1339I of the amino acid sequence provided in SEQ ID NO: 2, or in a corresponding mutation, or mutations, in any of the amino acid sequences provided in SEQ ID NO: 2 wherein X represents any amino acid.

38. The Cas9 protein of claim 36 or 37, wherein the amino acid sequence of the Cas9 protein comprises at least one, at least two, at least three, at least four, at least five, at least six, at least seven, at least eight, or at least nine mutations selected from the group consisting of F575S, D596Y, M631L, K649R, R664K, K710E, T740A, V743I, V748I, V750A, R753G, R765X, E790A, K797E, D853E, V922A, K961E, H985Y, D1012A, E1049G, 11057V, R1114G, Y1131C, D1135N, E1150V, K1156E, E1162A, D1180G, D1180A, K1191N, G1218S, Q1221H, P1249S, E1253K, N1286K, A1293T, N1308D, N1317K, A1320V, P1321S, D1332G, R1335L, and T1339I of the amino acid sequence provided in SEQ ID NO: 2 wherein X represents any amino acid.

39. The Cas9 protein of any one of claims 33-38, wherein the Cas9 protein comprises the combination of mutations of any one of the Cas9 clones listed in Table 3 or a combination of conservative mutations thereto.

40. The Cas9 protein of any one of claims 33-39, wherein the Cas9 protein comprises the combination of mutations of any one of the Cas9 clones listed in Table 3

41. The Cas9 protein of any one of claims 33-40, wherein the Cas9 protein comprises the combination of mutations of any one of the Cas9 clones selected from the group consisting of SacB.N4.19.TAT-4h-1; SacB.N4.19.TAT-4h-3; P12.2.b9-8; P12.3.b9-8; P12.3.b9-8 (ax); P12.3.b10-6; SacB.P12a2.AAT.3 hr.maj; SacB.P12a2.AAT.3 hr.min; P17.4-1; P17.4-2; P17.4-3; P17.4-4; P17.4-5; P17.4-6; P17.4-8; P17-4-1-1; P17-4-3-1; and P17-4-6-1, or a combination of conservative mutations thereto.

42. The Cas9 protein of any one of claims 33-41, wherein the Cas9 protein comprises the combination of mutations of any one of the Cas9 clones selected from the group consisting of SacB.N4.19.TAT-4h-1; SacB.N4.19.TAT-4h-3; P12.2.b9-8; P12.3.b9-8; P12.3.b9-8 (ax); P12.3.b10-6; SacB.P12a2.AAT.3 hr.maj; SacB.P12a2.AAT.3 hr.min; P17.4-1; P17.4-2; P17.4-3; P17.4-4; P17.4-5; P17.4-6; P17.4-8; P17-4-1-1; P17-4-3-1; and P17-4-6-1.

43. The Cas9 protein of any one of claims claim 33-42 comprising an amino acid sequence that is at least 85%, at least 90%, at least 92%, at least 95%, at least 96%, at least 97%, at least 98%, at least 99%, or at least 99.5% identical to the amino acid sequence of a Cas9 as provided by SEQ ID NOs: 2

44. The Cas9 protein of any one of claims 33-43, wherein the Cas9 exhibits an increased activity on a target sequence that does not comprise the canonical PAM (5′-NGG-3′) at its 3′ end as compared to Streptococcus pyogenes Cas9 as provided by SEQ ID NO: 2.

45. The Cas9 protein of any one of claims 33-44, wherein the Cas9 protein exhibits an activity on a target sequence having a 3′ end that is not directly adjacent to the canonical PAM sequence (5′-NGG-3′) that is at least 5-fold, at least 10-fold, at least 50-fold, at least 100-fold, at least 500-fold, at least 1,000-fold, at least 5,000-fold, at least 10,000-fold, at least 50,000-fold, at least 100,000-fold, at least 500,000-fold, or at least 1,000,000-fold increased as compared to the activity of Streptococcus pyogenes Cas9 as provided by SEQ ID NO: 2 n the same target sequence.

46. The Cas9 protein of claim 44 or 45, wherein the 3′ end of the target sequence is directly adjacent to an AAT, GAT, CAT, or TAT sequence.

47. The Cas9 protein of any one of claims 44-46, wherein the activity is measured by a nuclease assay, a deamination assay, or a transcriptional activation assay.

48. The Cas9 protein of any one of claims 33-47, wherein the Cas9 protein comprises a D10A and/or a H840A mutation of the amino acid sequence provided in SEQ ID NO: 2 or a corresponding mutation, or mutations, in another Cas9 amino sequence.

49. The Cas9 protein of any one of claims 1-48, wherein the Cas9 exhibits an increased activity on a target sequence comprising a PAM sequence selected from the group consisting of AAA, AAC, AAG, AAT, CAA, CAC, CAG, CAT, GAA, GAC, GAG, GAT, TAA, TAC, TAG, TAT, ACA, ACC, ACG, ACT, CCA, CCC, CCG, CCT, GCA, GCC, GCG, GCT, TCA, TCC, TCG, TCT, AGA, AGC, AGT, CGA, CGC, CGT, GGA, GGC, GGT, TGA, TGC, TGT, ATA, ATC, ATG, ATT, CTA, CTC, CTG, CTT, GTA, GTC, GTG, GTT, TTA, TTC, TTG, and TTT at its 3′ end as compared to Streptococcus pyogenes Cas9 as provided by SEQ ID NO: 2.

50. The Cas9 protein of any one of claims 1-49, wherein the Cas9 protein exhibits lower off-target activity as compared to an off-target activity of the Streptococcus pyogenes Cas9 domain as provided by SEQ ID NO: 2.

51. A fusion protein comprising (i) the Cas9 protein of any one of claims 1-50, and (ii) an effector domain.

52. The fusion protein of claim 51, wherein the effector domain is a domain that comprises nuclease activity, nickase activity, recombinase activity, deaminase activity, methyltransferase activity, methylase activity, acetylase activity, acetyltransferase activity, transcriptional activation activity, or transcriptional repression activity.

53. The fusion protein of claim 51 or 52, wherein the effector domain is a nucleic acid editing domain.

54. The fusion protein of claim 53, wherein the nucleic acid editing domain comprises a deaminase domain.

55. The fusion protein of claim 54, wherein the deaminase domain is a cytidine deaminase domain.

56. The fusion protein of claim 55, wherein the cytidine deaminase domain is an apolipoprotein B mRNA-editing complex (APOBEC) family deaminase.

57. The fusion protein of claim 55 or 56, wherein the cytidine deaminase domain is at least 80%, at least 85%, at least 90%, at least 92%, at least 95%, at least 96%, at least 97%, at least 98%, at least 99%, or at least 99.5% identical to the cytidine deaminase domain of any one of SEQ ID NOs: 27-61.

58. The fusion protein of claim 55 or 56, wherein the cytidine deaminase domain comprises the amino acid sequence of any one of SEQ ID NOs: 27-61.

59. The fusion protein of any one of claims 51-58, wherein the fusion protein further comprises a uracil glycosylase inhibitor (UGI) domain.

60. The fusion protein of claim 59, wherein the UGI domain comprises the amino acid sequence of SEQ ID NO: 115.

61. The fusion protein of any one of claims 51-60, wherein the fusion protein comprises the amino acid sequence of SEQ ID NO: 122.

62. The fusion protein of any one of claims 51-60, wherein the fusion protein comprises the amino acid sequence of SEQ ID NO: 123.

63. The fusion protein of any one of claims 51-62, wherein the fusion protein further comprises a second UGI domain.

64. The fusion protein of claim 63, wherein the fusion protein comprises the amino acid sequence of SEQ ID NO: 123.

65. The fusion protein of claim 63, wherein the fusion protein comprises the amino acid sequence of SEQ ID NO: 124.

66. The fusion protein of claim 54, wherein the deaminase domain is an adenosine deaminase domain.

67. The fusion protein of claim 66 further comprising a second adenosine deaminase domain.

68. The fusion protein of claim 67, wherein the first adenosine deaminase domain and the second adenosine deaminase domain comprises an ecTadA domain, or variant thereof.

69. The fusion protein of claim 68, wherein the first adenosine deaminase domain and the second adenosine deaminase domain comprise the amino acid sequence of any one of SEQ ID NOs: 62-84.

70. The fusion protein of claim 69, wherein the first adenosine deaminase comprises the amino acid sequence of SEQ ID NO: 62-84.

71. The fusion protein of claim 69, wherein the second adenosine deaminase comprises the amino acid sequence of SEQ ID NO: 62-84.

72. The fusion protein of any one of claims 66-71, wherein the fusion protein comprises the amino acid sequence of SEQ ID NO: 127.

73. The fusion protein of any one of claims 66-71, wherein the fusion protein comprises the amino acid sequence of SEQ ID NO: 128.

74. A complex comprising the fusion protein of any one of claims 51-73, and a guide RNA bound to the Cas9 protein.

75. The complex of claim 74, wherein the guide RNA is about 15-100 nucleotides long and comprises a sequence of at least 10 contiguous nucleotides that is complementary to a target sequence.

76. The complex of claim 75, wherein the 3′ end of the target sequence is directly adjacent to an AAA, AAC, AAG, AAT, CAA, CAC, CAG, CAT, GAA, GAC, GAG, GAT, TAA, TAC, TAG, TAT, ACA, ACC, ACG, ACT, CCA, CCC, CCG, CCT, GCA, GCC, GCG, GCT, TCA, TCC, TCG, TCT, AGA, AGC, AGT, CGA, CGC, CGT, GGA, GGC, GGT, TGA, TGC, TGT, ATA, ATC, ATG, ATT, CTA, CTC, CTG, CTT, GTA, GTC, GTG, GTT, TTA, TTC, TTG, or TTT sequence.

77. The complex of claim 75 or 76, wherein the 3′ end of the target sequence is directly adjacent to an AAA, GAA, CAA, or TAA sequence.

78. The complex of claim 75 or 76, wherein the 3′ end of the target sequence is directly adjacent to an AAC, GAC, CAC, or TAC sequence.

79. The complex of claim 75 or 76, wherein the 3′ end of the target sequence is directly adjacent to an AAT, GAT, CAT, or TAT sequence.

80. The complex of any one of claims 74-79, wherein the guide RNA is 15, 16, 17, 18, 19, 20, 21, 22, 23, 24, 25, 26, 27, 28, 29, 30, 31, 32, 33, 34, 35, 36, 37, 38, 39, 40, 41, 42, 43, 44, 45, 46, 47, 48, 49, or 50 nucleotides long.

81. The complex of any one of claims 75-80, wherein the guide RNA comprises a sequence of 15, 16, 17, 18, 19, 20, 21, 22, 23, 24, 25, 26, 27, 28, 29, 30, 31, 32, 33, 34, 35, 36, 37, 38, 39, or 40 contiguous nucleotides that is complementary to a target sequence.

82. The complex of any one of claims 75-81, wherein the target sequence is a DNA sequence.

83. The complex of claim 82, wherein the target sequence is a sequence in the genome of a mammal.

84. The complex of claim 83, wherein the target sequence is a sequence in the genome of a human.

85. The complex of any one of claims 75-84, wherein the target sequence comprises a sequence associated with a disease or disorder.

86. The complex of claim 85, wherein the target sequence comprises a point mutation associated with a disease or disorder.

87. The complex of claim 86, wherein the complex edits a point mutation in the target sequence.

88. The complex of claim 87, wherein the point mutation is located between about 10 to about 20 nucleotides upstream of the PAM in the target sequence.

89. The complex of claim 87 or 88, wherein the target sequence comprises a T to C point mutation.

90. The complex of claim 89, wherein the complex deaminates the target C point mutation, and wherein the deamination results in a sequence that is not associated with a disease or disorder.

91. The complex of claim 90, wherein the target C point mutation is present in the DNA strand that is not complementary to the guide RNA.

92. The complex of claim 87 or 88, wherein the target sequence comprises a G to A point mutation.

93. The complex of claim 92, wherein the complex deaminates the target A point mutation, and wherein the deamination results in a sequence that is not associated with a disease or disorder.

94. The complex of claim 93, wherein the target A point mutation is present in the DNA strand that is not complementary to the guide RNA.

95. The complex of any one of claims 74-94, wherein the complex exhibits increased deamination efficiency of a point mutation in a target sequence that does not comprise the canonical PAM (5′-NGG-3′) at its 3′ end as compared to the deamination efficiency of a complex comprising Streptococcus pyogenes Cas9 protein as provided by SEQ ID NO: 2.

96. The complex of claim 95, wherein the complex exhibits increased deamination efficiency of a point mutation in a target sequence having a 3′ end that is not directly adjacent to the canonical PAM sequence (5′-NGG-3′) that is at least 2-fold, at least 3-fold, at least 4-fold, at least 5-fold, at least 10-fold, at least 50-fold, at least 100-fold, at least 500-fold, at least 1,000-fold, at least 5,000-fold, at least 10,000-fold, at least 50,000-fold, at least 100,000-fold, at least 500,000-fold, or at least 1,000,000-fold increased as compared to the deamination efficiency of complex comprising the Streptococcus pyogenes Cas9 protein as provided by SEQ ID NO: 2 on the same target sequence.

97. The complex of any one of claims 90-96, wherein a deamination activity is measured using a deamination assay, PCR, or sequencing.

98. The complex of any one of claims 74-97, wherein the complex produces fewer indels in a target sequence that does not comprise the canonical PAM (5′-NGG-3′) at its 3′ end as compared to the amount of indels produced by a complex comprising Streptococcus pyogenes Cas9 protein as provided by SEQ ID NO: 2.

99. The complex of claim 98, wherein the complex produces fewer indels in a target sequence having a 3′ end that is not directly adjacent to the canonical PAM sequence (5′-NGG-3′) that is at least 2-fold, at least 3-fold, at least 4-fold, at least 5-fold, at least 10-fold, at least 50-fold, at least 100-fold, at least 500-fold, at least 1,000-fold, at least 5,000-fold, at least 10,000-fold, at least 50,000-fold, at least 100,000-fold, at least 500,000-fold, or at least 1,000,000-fold lower as compared to the amount of indels produced by a complex comprising Streptococcus pyogenes Cas9 protein as provided by SEQ ID NO: 2 on the same target sequence.

100. The complex of any one of claims 98-99, wherein indels are measured using high-throughput sequencing.

101. The complex of any one of claims 74-100, wherein the complex exhibits a decreased off-target activity as compared to the off-target activity of a complex comprising Streptococcus pyogenes Cas9 protein as provided by SEQ ID NO: 2.

102. The complex of claim 101, wherein the off-target activity of the complex is at least 2-fold, at least 3-fold, at least 4-fold, at least 5-fold, at least 10-fold, at least 50-fold, at least 100-fold, at least 500-fold, at least 1,000-fold, at least 5,000-fold, at least 10,000-fold, at least 50,000-fold, at least 100,000-fold, at least 500,000-fold, or at least 1,000,000-fold decreased as compared to the off-target activity of a complex comprising Streptococcus pyogenes Cas9 protein as provided by SEQ ID NO: 2.

103. The complex of any one of claims 75-102, wherein the target sequence is in the genome of an organism.

104. The complex of claim 103, wherein the organism is a prokaryote.

105. The complex of claim 104, wherein the prokaryote is a bacterium.

106. The complex of claim 103, wherein the organism is a eukaryote.

107. The complex of claim 103, wherein the organism is a plant or fungus.

108. The complex of claim 103, wherein the organism is a vertebrate.

109. The complex of claim 108, wherein the vertebrate is a mammal.

110. The complex of claim 109, wherein the mammal is a human.

111. The complex of claim 103, wherein the organism is a cell.

112. The complex of claim 111, wherein the cell is a human cell.

113. A method comprising contacting a nucleic acid with the fusion protein of any one of claims 51-73, and with a guide RNA, wherein the guide RNA is about 15-100 nucleotides long and comprises a sequence of at least 10 contiguous nucleotides that is complementary to a target sequence.

114. A method comprising contacting a cell with the fusion protein of any one of claims 51-73, and with a guide RNA, wherein the guide RNA is about 15-100 nucleotides long and comprises a sequence of at least 10 contiguous nucleotides that is complementary to a target sequence.

115. A method comprising contacting a nucleic acid with the complex of any one of claims 74-112.

116. A method comprising contacting a cell with the complex of any one of claims 74-112.

117. The method of any one of claims 113-116, wherein the contacting is performed in vitro.

118. The method of any one of claims 114-116, wherein the contacting is performed in vivo.

119. A method comprising administering to a subject the fusion protein of any one of claims 51-73, and a guide RNA, wherein the guide RNA is about 15-100 nucleotides long and comprises a sequence of at least 10 contiguous nucleotides that is complementary to a target sequence.

120. A method comprising administering to a subject the complex of any one of claims 74-112.

121. The method of any one of claims 113-120, wherein the target sequence of the nucleic acid is a DNA sequence.

122. The method of any one of claims 113-121, wherein the 3′ end of the target sequence is not immediately adjacent to the canonical PAM sequence (5′-NGG-3′).

123. The method of claim 122, wherein the 3′ end of the target sequence is directly adjacent to a sequence selected from the group consisting of AAA, GAA, CAA, and TAA.

124. The complex of claim 122, wherein the 3′ end of the target sequence is directly adjacent to a sequence selected from the group consisting of AAC, GAC, CAC, and TAC.

125. The complex of claim 122, wherein the 3′ end of the target sequence is directly adjacent to a sequence selected from the group consisting of AAT, GAT, CAT, and TAT.

126. The method of any one of claims 113-125, wherein the target sequence comprises a sequence associated with a disease or disorder.

127. The method of claim 126, wherein the target DNA sequence comprises a point mutation associated with a disease or disorder.

128. The method of claim 127, wherein the activity of the fusion protein, or the activity of the complex, results in a correction of the point mutation.

129. The method of any one of claims 127-128, wherein the target DNA sequence comprises a T to C point mutation associated with a disease or disorder, and wherein the deamination of the mutant C base results in a sequence that is not associated with a disease or disorder.

130. The method of claim 129, wherein the target DNA sequence encodes a protein and wherein the point mutation is in a codon and results in a change in the amino acid encoded by the mutant codon as compared to the wild-type codon.

131. The method of claim 130, wherein the deamination of the mutant C results in a change of the amino acid encoded by the mutant codon.

132. The method of claim 131, wherein the deamination of the mutant C results in the codon encoding the wild-type amino acid.

133. The method of any one of claims 127-128, wherein the target DNA sequence comprises a G to A point mutation associated with a disease or disorder, and wherein the deamination of the mutant A base results in a sequence that is not associated with a disease or disorder.

134. The method of claim 133, wherein the target DNA sequence encodes a protein and wherein the point mutation is in a codon and results in a change in the amino acid encoded by the mutant codon as compared to the wild-type codon.

135. The method of claim 134, wherein the deamination of the mutant A results in a change of the amino acid encoded by the mutant codon.

136. The method of claim 135, wherein the deamination of the mutant A results in the codon encoding the wild-type amino acid.

137. The method of any one of claims 113-136, wherein the contacting is in vivo in a subject.

138. The method of claim 137, wherein the subject has or has been diagnosed with a disease or disorder.

139. The method of claim 137 or 138, wherein the disease or disorder is a proliferative disease, a genetic disease, a neoplastic disease, a metabolic disease, or a lysosomal storage disease.

140. A kit comprising a nucleic acid construct, comprising:
(a) a nucleic acid sequence encoding the fusion protein of any one of claims 51-73; and
(b) a heterologous promoter that drives expression of the sequence of (a).

141. A kit comprising a nucleic acid construct, comprising:
(a) a nucleic acid sequence encoding the complex of any one of claims 74-112; and
(b) a heterologous promoter that drives expression of the sequence of (a).

142. The kit of claim 140 further comprising an expression construct encoding a guide RNA backbone, wherein the construct comprises a cloning site positioned to allow the cloning of a nucleic acid sequence identical or complementary to a target sequence into the guide RNA backbone.

143. A polynucleotide encoding the fusion protein of any one of claims 51-73 or the complex of any one of claims 74-112.

144. A vector comprising a polynucleotide of claim 143.

145. The vector of claim 144, wherein the vector comprises a heterologous promoter driving expression of the polynucleotide encoding the fusion protein or the polynucleotide encoding the complex.

146. A method comprising contacting a cell with the vector of claim 144 or 145.

147. The method of claim 146, wherein the cell vector is transfected into the cell.

148. The method of claim 147, wherein the vector is transfected into the cell using electroporation, heat shock, or a composition comprising a cationic lipid.

149. A cell comprising the fusion protein of any one of claims 51-73, or a nucleic acid molecule encoding the fusion protein of any one of claims 51-73.

150. A cell comprising the complex of any one of claims 74-112, or a nucleic acid molecule encoding the complex of any one of claims 74-112.

151. A cell comprising the vector of claim 144 or 145.

152. An SpCas9 comprising the amino acid sequence of SEQ ID NO: 122, wherein the SpCas9 has a non-canonical PAM specificity.

153. An SpCas9 comprising the amino acid sequence of SEQ ID NO: 123, wherein the SpCas9 has a non-canonical PAM specificity.

154. An SpCas9 comprising the amino acid sequence of SEQ ID NO: 124, wherein the SpCas9 has a non-canonical PAM specificity.

155. A fusion protein comprising an SpCas9 of any of claims 152-154 and a cytidine deaminase.

156. The fusion protein of claim 155, wherein the cytidine deaminase comprises any one of SEQ ID NOs: 27-61.

157. A fusion protein comprising an SpCas9 of any of claims 152-154 and an adenosine deaminase.

158. The fusion protein of claim 155, wherein the adenosine deaminase comprises any one of SEQ ID NOs: 62-84.

159. A complex comprising a fusion protein of any one of claims 155-158 and a guide RNA.

The application's sequence listing, which the Patent Office published only in electronic form, follows.

SEQUENCE LISTING (412 sequences)

SEQ ID NO: 1 - DNA, 4104 bp, Streptococcus pyogenes
atggataagaaatactcaataggcttagatatcggcacaaatagcgtcggatgggcggtgatcactgatgattataaggttccgtctaaaaagttcaaggttctgggaaatacagaccgccacagtatcaaaaaaaatcttataggggctcttttatttggcagtggagagacagcggaagcgactcgtctcaaacggacagctcgtagaaggtatacacgtcggaagaatcgtatttgttatctacaggagattttttcaaatgagatggcgaaagtagatgatagtttctttcatcgacttgaagagtcttttttggtggaagaagacaagaagcatgaacgtcatcctatttttggaaatatagtagatgaagttgcttatcatgagaaatatccaactatctatcatctgcgaaaaaaattggcagattctactgataaagcggatttgcgcttaatctatttggccttagcgcatatgattaagtttcgtggtcattttttgattgagggagatttaaatcctgataatagtgatgtggacaaactatttatccagttggtacaaatctacaatcaattatttgaagaaaaccctattaacgcaagtagagtagatgctaaagcgattctttctgcacgattgagtaaatcaagacgattagaaaatctcattgctcagctccccggtgagaagagaaatggcttgtttgggaatctcattgctttgtcattgggattgacccctaattttaaatcaaattttgatttggcagaagatgctaaattacagctttcaaaagatacttacgatgatgatttagataatttattggcgcaaattggagatcaatatgctgatttgtttttggcagctaagaatttatcagatgctattttactttcagatatcctaagagtaaatagtgaaataactaaggctcccctatcagcttcaatgattaagcgctacgatgaacatcatcaagacttgactcttttaaaagctttagttcgacaacaacttccagaaaagtataaagaaatcttttttgatcaatcaaaaaacggatatgcaggttatattgatgggggagctagccaagaagaattttataaatttatcaaaccaattttagaaaaaatggatggtactgaggaattattggtgaaactaaatcgtgaagatttgctgcgcaagcaacggacctttgacaacggctctattccccatcaaattcacttgggtgagctgcatgctattttgagaagacaagaagacttttatccatttttaaaagacaatcgtgagaagattgaaaaaatcttgacttttcgaattccttattatgttggtccattggcgcgtggcaatagtcgttttgcatggatgactcggaagtctgaagaaacaattaccccatggaattttgaagaagttgtcgataaaggtgcttcagctcaatcatttattgaacgcatgacaaactttgataaaaatcttccaaatgaaaaagtactaccaaaacatagtttgctttatgagtattttacggtttataacgaattgacaaaggtcaaatatgttactgagggaatgcgaaaaccagcatttctttcaggtgaacagaagaaagccattgttgatttactcttcaaaacaaatcgaaaagtaaccgttaagcaattaaaagaagattatttcaaaaaaatagaatgttttgatagtgttgaaatttcaggagttgaagatagatttaatgcttcattaggcgcctaccatgatttgctaaaaattattaaagataaagattttttggataatgaagaaaatgaagatatcttagaggatattgttttaacattgaccttatttgaagatagggggatgattgaggaaagacttaaaacatatgctcacctctttgatgataaggtgatgaaacagcttaaacgtcgccgttatactggttggggacgtttgtctcgaaaattgattaatggtattagggataagcaatctggcaaaacaatattagattttttgaaatcagatggttttgccaatcgcaattttatgcagctgatccatgatgatagtttgacatttaaagaagatattcaaaaagcacaggtgtctggacaaggccatagtttacatgaacagattgctaacttagctggcagtcctgctattaaaaaaggtattttacagactgtaaaaattgttgatgaactggtcaaagtaatggggcataagccagaaaatatcgttattgaaatggcacgtgaaaatcagacaactcaaaagggccagaaaaattcgcgagagcgtatgaaacgaatcgaagaaggtatcaaagaattaggaagtcagattcttaaagagcatcctgttgaaaatactcaattgcaaaatgaaaagctctatctctattatctacaaaatggaagagacatgtatgtggaccaagaattagatattaatcgtttaagtgattatgatgtcgatcacattgttccacaaagtttcattaaagacgattcaatagacaataaggtactaacgcgttctgataaaaatcgtggtaaatcggataacgttccaagtgaagaagtagtcaaaaagatgaaaaactattggagacaacttctaaacgccaagttaatcactcaacgtaagtttgataatttaacgaaagctgaacgtggaggtttgagtgaacttgataaagctggttttatcaaacgccaattggttgaaactcgccaaatcactaagcatgtggcacaaattttggatagtcgcatgaatactaaatacgatgaaaatgataaacttattcgagaggttaaagtgattaccttaaaatctaaattagtttctgacttccgaaaagatttccaattctataaagtacgtgagattaacaattaccatcatgcccatgatgcgtatctaaatgccgtcgttggaactgctttgattaagaaatatccaaaacttgaatcggagtttgtctatggtgattataaagtttatgatgttcgtaaaatgattgctaagtctgagcaagaaataggcaaagcaaccgcaaaatatttcttttactctaatatcatgaacttcttcaaaacagaaattacacttgcaaatggagagattcgcaaacgccctctaatcgaaactaatggggaaactggagaaattgtctgggataaagggcgagattttgccacagtgcgcaaagtattgtccatgccccaagtcaatattgtcaagaaaacagaagtacagacaggcggattctccaaggagtcaattttaccaaaaagaaattcggacaagcttattgctcgtaaaaaagactgggatccaaaaaaatatggtggttttgatagtccaacggtagcttattcagtcctagtggttgctaaggtggaaaaagggaaatcgaagaagttaaaatccgttaaagagttactagggatcacaattatggaaagaagttcctttgaaaaaaatccgattgactttttagaagctaaaggatataaggaagttaaaaaagacttaatcattaaactacctaaatatagtctttttgagttagaaaacggtcgtaaacggatgctggctagtgccggagaattacaaaaaggaaatgagctggctctgccaagcaaatatgtgaattttttatatttagctagtcattatgaaaagttgaagggtagtccagaagataacgaacaaaaacaattgtttgtggagcagcataagcattatttagatgagattattgagcaaatcagtgaattttctaagcgtgttattttagcagatgccaatttagataaagttcttagtgcatataacaaacatagagacaaaccaatacgtgaacaagcagaaaatattattcatttatttacgttgacgaatcttggagctcccgctgcttttaaatattttgatacaacaattgatcgtaaacgatatacgtctacaaaagaagttttagatgccactcttatccatcaatccatcactggtctttatgaaacacgcattgatttgagtcagctaggaggtgactga

SEQ ID NO: 2 - protein, 1367 aa, Streptococcus pyogenes
MDKKYSIGLDIGTNSVGWAVITDDYKVPSKKFKVLGNTDRHSIKKNLIGALLFGSGETAEATRLKRTARRRYTRRKNRICYLQEIFSNEMAKVDDSFFHRLEESFLVEEDKKHERHPIFGNIVDEVAYHEKYPTIYHLRKKLADSTDKADLRLIYLALAHMIKFRGHFLIEGDLNPDNSDVDKLFIQLVQIYNQLFEENPINASRVDAKAILSARLSKSRRLENLIAQLPGEKRNGLFGNLIALSLGLTPNFKSNFDLAEDAKLQLSKDTYDDDLDNLLAQIGDQYADLFLAAKNLSDAILLSDILRVNSEITKAPLSASMIKRYDEHHQDLTLLKALVRQQLPEKYKEIFFDQSKNGYAGYIDGGASQEEFYKFIKPILEKMDGTEELLVKLNREDLLRKQRTFDNGSIPHQIHLGELHAILRRQEDFYPFLKDNREKIEKILTFRIPYYVGPLARGNSRFAWMTRKSEETITPWNFEEVVDKGASAQSFIERMTNFDKNLPNEKVLPKHSLLYEYFTVYNELTKVKYVTEGMRKPAFLSGEQKKAIVDLLFKTNRKVTVKQLKEDYFKKIECFDSVEISGVEDRFNASLGAYHDLLKIIKDKDFLDNEENEDILEDIVLTLTLFEDRGMIEERLKTYAHLFDDKVMKQLKRRRYTGWGRLSRKLINGIRDKQSGKTILDFLKSDGFANRNFMQLIHDDSLTFKEDIQKAQVSGQGHSLHEQIANLAGSPAIKKGILQTVKIVDELVKVMGHKPENIVIEMARENQTTQKGQKNSRERMKRIEEGIKELGSQILKEHPVENTQLQNEKLYLYYLQNGRDMYVDQELDINRLSDYDVDHIVPQSFIKDDSIDNKVLTRSDKNRGKSDNVPSEEVVKKMKNYWRQLLNAKLITQRKFDNLTKAERGGLSELDKAGFIKRQLVETRQITKHVAQILDSRMNTKYDENDKLIREVKVITLKSKLVSDFRKDFQFYKVREINNYHHAHDAYLNAVVGTALIKKYPKLESEFVYGDYKVYDVRKMIAKSEQEIGKATAKYFFYSNIMNFFKTEITLANGEIRKRPLIETNGETGEIVWDKGRDFATVRKVLSMPQVNIVKKTEVQTGGFSKESILPKRNSDKLIARKKDWDPKKYGGFDSPTVAYSVLVVAKVEKGKSKKLKSVKELLGITIMERSSFEKNPIDFLEAKGYKEVKKDLIIKLPKYSLFELENGRKRMLASAGELQKGNELALPSKYVNFLYLASHYEKLKGSPEDNEQKQLFVEQHKHYLDEIIEQISEFSKRVILADANLDKVLSAYNKHRDKPIREQAENIIHLFTLTNLGAPAAFKYFDTTIDRKRYTSTKEVLDATLIHQSITGLYETRIDLSQLGGD

SEQ ID NO: 3 - DNA, 4212 bp, Streptococcus pyogenes
atggataaaaagtattctattggtttagacatcggcactaattccgttggatgggctgtcataaccgatgaatacaaagtaccttcaaagaaatttaaggtgttggggaacacagaccgtcattcgattaaaaagaatcttatcggtgccctcctattcgatagtggcgaaacggcagaggcgactcgcctgaaacgaaccgctcggagaaggtatacacgtcgcaagaaccgaatatgttacttacaagaaatttttagcaatgagatggccaaagttgacgattctttctttcaccgtttggaagagtccttccttgtcgaagaggacaagaaacatgaacggcaccccatctttggaaacatagtagatgaggtggcatatcatgaaaagtacccaacgatttatcacctcagaaaaaagctagttgactcaactgataaagcggacctgaggttaatctacttggctcttgcccatatgataaagttccgtgggcactttctcattgagggtgatctaaatccggacaactcggatgtcgacaaactgttcatccagttagtacaaacctataatcagttgtttgaagagaaccctataaatgcaagtggcgtggatgcgaaggctattcttagcgcccgcctctctaaatcccgacggctagaaaacctgatcgcacaattacccggagagaagaaaaatgggttgttcggtaaccttatagcgctctcactaggcctgacaccaaattttaagtcgaacttcgacttagctgaagatgccaaattgcagcttagtaaggacacgtacgatgacgatctcgacaatctactggcacaaattggagatcagtatgcggacttatttttggctgccaaaaaccttagcgatgcaatcctcctatctgacatactgagagttaatactgagattaccaaggcgccgttatccgcttcaatgatcaaaaggtacgatgaacatcaccaagacttgacacttctcaaggccctagtccgtcagcaactgcctgagaaatataaggaaatattctttgatcagtcgaaaaacgggtacgcaggttatattgacggcggagcgagtcaagaggaattctacaagtttatcaaacccatattagagaagatggatgggacggaagagttgcttgtaaaactcaatcgcgaagatctactgcgaaagcagcggactttcgacaacggtagcattccacatcaaatccacttaggcgaattgcatgctatacttagaaggcaggaggatttttatccgttcctcaaagacaatcgtgaaaagattgagaaaatcctaacctttcgcataccttactatgtgggacccctggcccgagggaactctcggttcgcatggatgacaagaaagtccgaagaaacgattactccatggaattttgaggaagttgtcgataaaggtgcgtcagctcaatcgttcatcgagaggatgaccaactttgacaagaatttaccgaacgaaaaagtattgcctaagcacagtttactttacgagtatttcacagtgtacaatgaactcacgaaagttaagtatgtcactgagggcatgcgtaaacccgcctttctaagcggagaacagaagaaagcaatagtagatctgttattcaagaccaaccgcaaagtgacagttaagcaattgaaagaggactactttaagaaaattgaatgcttcgattctgtcgagatctccggggtagaagatcgatttaatgcgtcacttggtacgtatcatgacctcctaaagataattaaagataaggacttcctggataacgaagagaatgaagatatcttagaagatatagtgttgactcttaccctctttgaagatcgggaaatgattgaggaaagactaaaaacatacgctcacctgttcgacgataaggttatgaaacagttaaagaggcgtcgctatacgggctggggacgattgtcgcggaaacttatcaacgggataagagacaagcaaagtggtaaaactattctcgattttctaaagagcgacggcttcgccaataggaactttatgcagctgatccatgatgactctttaaccttcaaagaggatatacaaaaggcacaggtttccggacaaggggactcattgcacgaacatattgcgaatcttgctggttcgccagccatcaaaaagggcatactccagacagtcaaagtagtggatgagctagttaaggtcatgggacgtcacaaaccggaaaacattgtaatcgagatggcacgcgaaaatcaaacgactcagaaggggcaaaaaaacagtcgagagcggatgaagagaatagaagagggtattaaagaactgggcagccagatcttaaaggagcatcctgtggaaaatacccaattgcagaacgagaaactttacctctattacctacaaaatggaagggacatgtatgttgatcaggaactggacataaaccgtttatctgattacgacgtcgatcacattgtaccccaatcctttttgaaggacgattcaatcgacaataaagtgcttacacgctcggataagaaccgagggaaaagtgacaatgttccaagcgaggaagtcgtaaagaaaatgaagaactattggcggcagctcctaaatgcgaaactgataacgcaaagaaagttcgataacttaactaaagctgagaggggtggcttgtctgaacttgacaaggccggatttattaaacgtcagctcgtggaaacccgccaaatcacaaagcatgttgcacagatactagattcccgaatgaatacgaaatacgacgagaacgataagctgattcgggaagtcaaagtaatcactttaaagtcaaaattggtgtcggacttcagaaaggattttcaattctataaagttagggagataaataactaccaccatgcgcacgacgcttatcttaatgccgtcgtagggaccgcactcattaagaaatacccgaagctagaaagtgagtttgtgtatggtgattacaaagtttatgacgtccgtaagatgatcgcgaaaagcgaacaggagataggcaaggctacagccaaatacttcttttattctaacattatgaatttctttaagacggaaatcactctggcaaacggagagatacgcaaacgacctttaattgaaaccaatggggagacaggtgaaatcgtatgggataagggccgggacttcgcgacggtgagaaaagttttgtccatgccccaagtcaacatagtaaagaaaactgaggtgcagaccggagggttttcaaaggaatcgattcttccaaaaaggaatagtgataagctcatcgctcgtaaaaaggactgggacccgaaaaagtacggtggcttcgatagccctacagttgcctattctgtcctagtagtggcaaaagttgagaagggaaaatccaagaaactgaagtcagtcaaagaattattggggataacgattatggagcgctcgtcttttgaaaagaaccccatcgacttccttgaggcgaaaggttacaaggaagtaaaaaaggatctcataattaaactaccaaagtatagtctgtttgagttagaaaatggccgaaaacggatgttggctagcgccggagagcttcaaaaggggaacgaactcgcactaccgtctaaatacgtgaatttcctgtatttagcgtcccattacgagaagttgaaaggttcacctgaagataacgaacagaagcaactttttgttgagcagcacaaacattatctcgacgaaatcatagagcaaatttcggaattcagtaagagagtcatcctagctgatgccaatctggacaaagtattaagcgcatacaacaagcacagggataaacccatacgtgagcaggcggaaaatattatccatttgtttactcttaccaacctcggcgctccagccgcattcaagtattttgacacaacgatagatcgcaaacgatacacttctaccaaggaggtgctagacgcgacactgattcaccaatccatcacgggattatatgaaactcggatagatttgtcacagcttgggggtgacggatcccccaagaagaagaggaaagtctcgagcgactacaaagaccatgacggtgattataaagatcatgacatcgattacaaggatgacgatgacaaggctgcagga

SEQ ID NO: 4 - protein, 1404 aa, Streptococcus pyogenes
MDKKYSIGLDIGTNSVGWAVITDEYKVPSKKFKVLGNTDRHSIKKNLIGALLFDSGETAEATRLKRTARRRYTRRKNRICYLQEIFSNEMAKVDDSFFHRLEESFLVEEDKKHERHPIFGNIVDEVAYHEKYPTIYHLRKKLVDSTDKADLRLIYLALAHMIKFRGHFLIEGDLNPDNSDVDKLFIQLVQTYNQLFEENPINASGVDAKAILSARLSKSRRLENLIAQLPGEKKNGLFGNLIALSLGLTPNFKSNFDLAEDAKLQLSKDTYDDDLDNLLAQIGDQYADLFLAAKNLSDAILLSDILRVNTEITKAPLSASMIKRYDEHHQDLTLLKALVRQQLPEKYKEIFFDQSKNGYAGYIDGGASQEEFYKFIKPILEKMDGTEELLVKLNREDLLRKQRTFDNGSIPHQIHLGELHAILRRQEDFYPFLKDNREKIEKILTFRIPYYVGPLARGNSRFAWMTRKSEETITPWNFEEVVDKGASAQSFIERMTNFDKNLPNEKVLPKHSLLYEYFTVYNELTKVKYVTEGMRKPAFLSGEQKKAIVDLLFKTNRKVTVKQLKEDYFKKIECFDSVEISGVEDRFNASLGTYHDLLKIIKDKDFLDNEENEDILEDIVLTLTLFEDREMIEERLKTYAHLFDDKVMKQLKRRRYTGWGRLSRKLINGIRDKQSGKTILDFLKSDGFANRNFMQLIHDDSLTFKEDIQKAQVSGQGDSLHEHIANLAGSPAIKKGILQTVKVVDELVKVMGRHKPENIVIEMARENQTTQKGQKNSRERMKRIEEGIKELGSQILKEHPVENTQLQNEKLYLYYLQNGRDMYVDQELDINRLSDYDVDHIVPQSFLKDDSIDNKVLTRSDKNRGKSDNVPSEEVVKKMKNYWRQLLNAKLITQRKFDNLTKAERGGLSELDKAGFIKRQLVETRQITKHVAQILDSRMNTKYDENDKLIREVKVITLKSKLVSDFRKDFQFYKVREINNYHHAHDAYLNAVVGTALIKKYPKLESEFVYGDYKVYDVRKMIAKSEQEIGKATAKYFFYSNIMNFFKTEITLANGEIRKRPLIETNGETGEIVWDKGRDFATVRKVLSMPQVNIVKKTEVQTGGFSKESILPKRNSDKLIARKKDWDPKKYGGFDSPTVAYSVLVVAKVEKGKSKKLKSVKELLGITIMERSSFEKNPIDFLEAKGYKEVKKDLIIKLPKYSLFELENGRKRMLASAGELQKGNELALPSKYVNFLYLASHYEKLKGSPEDNEQKQLFVEQHKHYLDEIIEQISEFSKRVILADANLDKVLSAYNKHRDKPIREQAENIIHLFTLTNLGAPAAFKYFDTTIDRKRYTSTKEVLDATLIHQSITGLYETRIDLSQLGGDGSPKKKRKVSSDYKDHDGDYKDHDIDYKDDDDKAAG

SEQ ID NO: 5 - DNA, 4107 bp, Streptococcus pyogenes
atggataagaaatactcaataggcttagatatcggcacaaatagcgtcggatgggcggtgatcactgatgaatataaggttccgtctaaaaagttcaaggttctgggaaatacagaccgccacagtatcaaaaaaaatcttataggggctcttttatttgacagtggagagacagcggaagcgactcgtctcaaacggacagctcgtagaaggtatacacgtcggaagaatcgtatttgttatctacaggagattttttcaaatgagatggcgaaagtagatgatagtttctttcatcgacttgaagagtcttttttggtggaagaagacaagaagcatgaacgtcatcctatttttggaaatatagtagatgaagttgcttatcatgagaaatatccaactatctatcatctgcgaaaaaaattggtagattctactgataaagcggatttgcgcttaatctatttggccttagcgcatatgattaagtttcgtggtcattttttgattgagggagatttaaatcctgataatagtgatgtggacaaactatttatccagttggtacaaacctacaatcaattatttgaagaaaaccctattaacgcaagtggagtagatgctaaagcgattctttctgcacgattgagtaaatcaagacgattagaaaatctcattgctcagctccccggtgagaagaaaaatggcttatttgggaatctcattgctttgtcattgggtttgacccctaattttaaatcaaattttgatttggcagaagatgctaaattacagctttcaaaagatacttacgatgatgatttagataatttattggcgcaaattggagatcaatatgctgatttgtttttggcagctaagaatttatcagatgctattttactttcagatatcctaagagtaaatactgaaataactaaggctcccctatcagcttcaatgattaaacgctacgatgaacatcatcaagacttgactcttttaaaagctttagttcgacaacaacttccagaaaagtataaagaaatcttttttgatcaatcaaaaaacggatatgcaggttatattgatgggggagctagccaagaagaattttataaatttatcaaaccaattttagaaaaaatggatggtactgaggaattattggtgaaactaaatcgtgaagatttgctgcgcaagcaacggacctttgacaacggctctattccccatcaaattcacttgggtgagctgcatgctattttgagaagacaagaagacttttatccatttttaaaagacaatcgtgagaagattgaaaaaatcttgacttttcgaattccttattatgttggtccattggcgcgtggcaatagtcgttttgcatggatgactcggaagtctgaagaaacaattaccccatggaattttgaagaagttgtcgataaaggtgcttcagctcaatcatttattgaacgcatgacaaactttgataaaaatcttccaaatgaaaaagtactaccaaaacatagtttgctttatgagtattttacggtttataacgaattgacaaaggtcaaatatgttactgaaggaatgcgaaaaccagcatttctttcaggtgaacagaagaaagccattgttgatttactcttcaaaacaaatcgaaaagtaaccgttaagcaattaaaagaagattatttcaaaaaaatagaatgttttgatagtgttgaaatttcaggagttgaagatagatttaatgcttcattaggtacctaccatgatttgctaaaaattattaaagataaagattttttggataatgaagaaaatgaagatatcttagaggatattgttttaacattgaccttatttgaagatagggagatgattgaggaaagacttaaaacatatgctcacctctttgatgataaggtgatgaaacagcttaaacgtcgccgttatactggttggggacgtttgtctcgaaaattgattaatggtattagggataagcaatctggcaaaacaatattagattttttgaaatcagatggttttgccaatcgcaattttatgcagctgatccatgatgatagtttgacatttaaagaagacattcaaaaagcacaagtgtctggacaaggcgatagtttacatgaacatattgcaaatttagctggtagccctgctattaaaaaaggtattttacagactgtaaaagttgttgatgaattggtcaaagtaatggggcggcataagccagaaaatatcgttattgaaatggcacgtgaaaatcagacaactcaaaagggccagaaaaattcgcgagagcgtatgaaacgaatcgaagaaggtatcaaagaattaggaagtcagattcttaaagagcatcctgttgaaaatactcaattgcaaaatgaaaagctctatctctattatctccaaaatggaagagacatgtatgtggaccaagaattagatattaatcgtttaagtgattatgatgtcgatcacattgttccacaaagtttccttaaagacgattcaatagacaataaggtcttaacgcgttctgataaaaatcgtggtaaatcggataacgttccaagtgaagaagtagtcaaaaagatgaaaaactattggagacaacttctaaacgccaagttaatcactcaacgtaagtttgataatttaacgaaagctgaacgtggaggtttgagtgaacttgataaagctggttttatcaaacgccaattggttgaaactcgccaaatcactaagcatgtggcacaaattttggatagtcgcatgaatactaaatacgatgaaaatgataaacttattcgagaggttaaagtgattaccttaaaatctaaattagtttctgacttccgaaaagatttccaattctataaagtacgtgagattaacaattaccatcatgcccatgatgcgtatctaaatgccgtcgttggaactgctttgattaagaaatatccaaaacttgaatcggagtttgtctatggtgattataaagtttatgatgttcgtaaaatgattgctaagtctgagcaagaaataggcaaagcaaccgcaaaatatttcttttactctaatatcatgaacttcttcaaaacagaaattacacttgcaaatggagagattcgcaaacgccctctaatcgaaactaatggggaaactggagaaattgtctgggataaagggcgagattttgccacagtgcgcaaagtattgtccatgccccaagtcaatattgtcaagaaaacagaagtacagacaggcggattctccaaggagtcaattttaccaaaaagaaattcggacaagcttattgctcgtaaaaaagactgggatccaaaaaaatatggtggttttgatagtccaacggtagcttattcagtcctagtggttgctaaggtggaaaaagggaaatcgaagaagttaaaatccgttaaagagttactagggatcacaattatggaaagaagttcctttgaaaaaaatccgattgactttttagaagctaaaggatataaggaagttaaaaaagacttaatcattaaactacctaaatatagtctttttgagttagaaaacggtcgtaaacggatgctggctagtgccggagaattacaaaaaggaaatgagctggctctgccaagcaaatatgtgaattttttatatttagctagtcattatgaaaagttgaagggtagtccagaagataacgaacaaaaacaattgtttgtggagcagcataagcattatttagatgagattattgagcaaatcagtgaattttctaagcgtgttattttagcagatgccaatttagataaagttcttagtgcatataacaaacatagagacaaaccaatacgtgaacaagcagaaaatattattcatttatttacgttgacgaatcttggagctcccgctgcttttaaatattttgatacaacaattgatcgtaaacgatatacgtctacaaaagaagttttagatgccactcttatccatcaatccatcactggtctttatgaaacacgcattgatttgagtcagctaggaggtgactga

SEQ ID NO: 6 - protein, 1368 aa, Streptococcus pyogenes [sequence omitted]

SEQ ID NO: 7 - protein, 1368 aa, Streptococcus pyogenes
MDKKYSIGLAIGTNSVGWAVITDEYKVPSKKFKVLGNTDRHSIKKNLIGALLFDSGETAEATRLKRTARRRYTRRKNRICYLQEIFSNEMAKVDDSFFHRLEESFLVEEDKKHERHPIFGNIVDEVAYHEKYPTIYHLRKKLVDSTDKADLRLIYLALAHMIKFRGHFLIEGDLNPDNSDVDKLFIQLVQTYNQLFEENPINASGVDAKAILSARLSKSRRLENLIAQLPGEKKNGLFGNLIALSLGLTPNFKSNFDLAEDAKLQLSKDTYDDDLDNLLAQIGDQYADLFLAAKNLSDAILLSDILRVNTEITKAPLSASMIKRYDEHHQDLTLLKALVRQQLPEKYKEIFFDQSKNGYAGYIDGGASQEEFYKFIKPILEKMDGTEELLVKLNREDLLRKQRTFDNGSIPHQIHLGELHAILRRQEDFYPFLKDNREKIEKILTFRIPYYVGPLARGNSRFAWMTRKSEETITPWNFEEVVDKGASAQSFIERMTNFDKNLPNEKVLPKHSLLYEYFTVYNELTKVKYVTEGMRKPAFLSGEQKKAIVDLLFKTNRKVTVKQLKEDYFKKIECFDSVEISGVEDRFNASLGTYHDLLKIIKDKDFLDNEENEDILEDIVLTLTLFEDREMIEERLKTYAHLFDDKVMKQLKRRRYTGWGRLSRKLINGIRDKQSGKTILDFLKSDGFANRNFMQLIHDDSLTFKEDIQKAQVSGQGDSLHEHIANLAGSPAIKKGILQTVKVVDELVKVMGRHKPENIVIEMARENQTTQKGQKNSRERMKRIEEGIKELGSQILKEHPVENTQLQNEKLYLYYLQNGRDMYVDQELDINRLSDYDVDHIVPQSFLKDDSIDNKVLTRSDKNRGKSDNVPSEEVVKKMKNYWRQLLNAKLITQRKFDNLTKAERGGLSELDKAGFIKRQLVETRQITKHVAQILDSRMNTKYDENDKLIREVKVITLKSKLVSDFRKDFQFYKVREINNYHHAHDAYLNAVVGTALIKKYPKLESEFVYGDYKVYDVRKMIAKSEQEIGKATAKYFFYSNIMNFFKTEITLANGEIRKRPLIETNGETGEIVWDKGRDFATVRKVLSMPQVNIVKKTEVQTGGFSKESILPKRNSDKLIARKKDWDPKKYGGFDSPTVAYSVLVVAKVEKGKSKKLKSVKELLGITIMERSSFEKNPIDFLEAKGYKEVKKDLIIKLPKYSLFELENGRKRMLASAGELQKGNELALPSKYVNFLYLASHYEKLKGSPEDNEQKQLFVEQHKHYLDEIIEQISEFSKRVILADANLDKVLSAYNKHRDKPIREQAENIIHLFTLTNLGAPAAFKYFDTTIDRKRYTSTKEVLDATLIHQSITGLYETRIDLSQLGGD

SEQ ID NO: 8 - protein, 1368 aa, Streptococcus pyogenes
MDKKYSIGLDIGTNSVGWAVITDEYKVPSKKFKVLGNTDRHSIKKNLIGALLFDSGETAEATRLKRTARRRYTRRKNRICYLQEIFSNEMAKVDDSFFHRLEESFLVEEDKKHERHPIFGNIVDEVAYHEKYPTIYHLRKKLVDSTDKADLRLIYLALAHMIKFRGHFLIEGDLNPDNSDVDKLFIQLVQTYNQLFEENPINASGVDAKAILSARLSKSRRLENLIAQLPGEKKNGLFGNLIALSLGLTPNFKSNFDLAEDAKLQLSKDTYDDDLDNLLAQIGDQYADLFLAAKNLSDAILLSDILRVNTEITKAPLSASMIKRYDEHHQDLTLLKALVRQQLPEKYKEIFFDQSKNGYAGYIDGGASQEEFYKFIKPILEKMDGTEELLVKLNREDLLRKQRTFDNGSIPHQIHLGELHAILRRQEDFYPFLKDNREKIEKILTFRIPYYVGPLARGNSRFAWMTRKSEETITPWNFEEVVDKGASAQSFIERMTNFDKNLPNEKVLPKHSLLYEYFTVYNELTKVKYVTEGMRKPAFLSGEQKKAIVDLLFKTNRKVTVKQLKEDYFKKIECFDSVEISGVEDRFNASLGTYHDLLKIIKDKDFLDNEENEDILEDIVLTLTLFEDREMIEERLKTYAHLFDDKVMKQLKRRRYTGWGRLSRKLINGIRDKQSGKTILDFLKSDGFANRNFMQLIHDDSLTFKEDIQKAQVSGQGDSLHEHIANLAGSPAIKKGILQTVKVVDELVKVMGRHKPENIVIEMARENQTTQKGQKNSRERMKRIEEGIKELGSQILKEHPVENTQLQNEKLYLYYLQNGRDMYVDQELDINRLSDYDVDAIVPQSFLKDDSIDNKVLTRSDKNRGKSDNVPSEEVVKKMKNYWRQLLNAKLITQRKFDNLTKAERGGLSELDKAGFIKRQLVETRQITKHVAQILDSRMNTKYDENDKLIREVKVITLKSKLVSDFRKDFQFYKVREINNYHHAHDAYLNAVVGTALIKKYPKLESEFVYGDYKVYDVRKMIAKSEQEIGKATAKYFFYSNIMNFFKTEITLANGEIRKRPLIETNGETGEIVWDKGRDFATVRKVLSMPQVNIVKKTEVQTGGFSKESILPKRNSDKLIARKKDWDPKKYGGFDSPTVAYSVLVVAKVEKGKSKKLKSVKELLGITIMERSSFEKNPIDFLEAKGYKEVKKDLIIKLPKYSLFELENGRKRMLASAGELQKGNELALPSKYVNFLYLASHYEKLKGSPEDNEQKQLFVEQHKHYLDEIIEQISEFSKRVILADANLDKVLSAYNKHRDKPIREQAENIIHLFTLTNLGAPAAFKYFDTTIDRKRYTSTKEVLDATLIHQSITGLYETRIDLSQLGGD

SEQ ID NO: 9 - protein, 1368 aa, Streptococcus pyogenes
MDKKYSIGLAIGTNSVGWAVITDEYKVPSKKFKVLGNTDRHSIKKNLIGALLFDSGETAEATRLKRTARRRYTRRKNRICYLQEIFSNEMAKVDDSFFHRLEESFLVEEDKKHERHPIFGNIVDEVAYHEKYPTIYHLRKKLVDSTDKADLRLIYLALAHMIKFRGHFLIEGDLNPDNSDVDKLFIQLVQTYNQLFEENPINASGVDAKAILSARLSKSRRLENLIAQLPGEKKNGLFGNLIALSLGLTPNFKSNFDLAEDAKLQLSKDTYDDDLDNLLAQIGDQYADLFLAAKNLSDAILLSDILRVNTEITKAPLSASMIKRYDEHHQDLTLLKALVRQQLPEKYKEIFFDQSKNGYAGYIDGGASQEEFYKFIKPILEKMDGTEELLVKLNREDLLRKQRTFDNGSIPHQIHLGELHAILRRQEDFYPFLKDNREKIEKILTFRIPYYVGPLARGNSRFAWMTRKSEETITPWNFEEVVDKGASAQSFIERMTNFDKNLPNEKVLPKHSLLYEYFTVYNELTKVKYVTEGMRKPAFLSGEQKKAIVDLLFKTNRKVTVKQLKEDYFKKIECFDSVEISGVEDRFNASLGTYHDLLKIIKDKDFLDNEENEDILEDIVLTLTLFEDREMIEERLKTYAHLFDDKVMKQLKRRRYTGWGRLSRKLINGIRDKQSGKTILDFLKSDGFANRNFMQLIHDDSLTFKEDIQKAQVSGQGDSLHEHIANLAGSPAIKKGILQTVKVVDELVKVMGRHKPENIVIEMARENQTTQKGQKNSRERMKRIEEGIKELGSQILKEHPVENTQLQNEKLYLYYLQNGRDMYVDQELDINRLSDYDVDAIVPQSFLKDDSIDNKVLTRSDKNRGKSDNVPSEEVVKKMKNYWRQLLNAKLITQRKFDNLTKAERGGLSELDKAGFIKRQLVETRQITKHVAQILDSRMNTKYDENDKLIREVKVITLKSKLVSDFRKDFQFYKVREINNYHHAHDAYLNAVVGTALIKKYPKLESEFVYGDYKVYDVRKMIAKSEQEIGKATAKYFFYSNIMNFFKTEITLANGEIRKRPLIETNGETGEIVWDKGRDFATVRKVLSMPQVNIVKKTEVQTGGFSKESILPKRNSDKLIARKKDWDPKKYGGFDSPTVAYSVLVVAKVEKGKSKKLKSVKELLGITIMERSSFEKNPIDFLEAKGYKEVKKDLIIKLPKYSLFELENGRKRMLASAGELQKGNELALPSKYVNFLYLASHYEKLKGSPEDNEQKQLFVEQHKHYLDEIIEQISEFSKRVILADANLDKVLSAYNKHRDKPIREQAENIIHLFTLTNLGAPAAFKYFDTTIDRKRYTSTKEVLDATLIHQSITGLYETRIDLSQLGGD

SEQ ID NO: 10 - protein, 1052 aa, Staphylococcus aureus
KRNYILGLDIGITSVGYGIIDYETRDVIDAGVRLFKEANVENNEGRRSKRGARRLKRRRRHRIQRVKKLLFDYNLLTDHSELSGINPYEARVKGLSQKLSEEEFSAALLHLAKRRGVHNVNEVEEDTGNELSTKEQISRNSKALEEKYVAELQLERLKKDGEVRGSINRFKTSDYVKEAKQLLKVQKAYHQLDQSFIDTYIDLLETRRTYYEGPGEGSPFGWKDIKEWYEMLMGHCTYFPEELRSVKYAYNADLYNALNDLNNLVITRDENEKLEYYEKFQIIENVFKQKKKPTLKQIAKEILVNEEDIKGYRVTSTGKPEFTNLKVYHDIKDITARKEIIENAELLDQIAKILTIYQSSEDIQEELTNLNSELTQEEIEQISNLKGYTGTHNLSLKAINLILDELWHTNDNQIAIFNRLKLVPKKVDLSQQKEIPTTLVDDFILSPVVKRSFIQSIKVINAIIKKYGLPNDIIIELAREKNSKDAQKMINEMQKRNRQTNERIEEIIRTTGKENAKYLIEKIKLHDMQEGKCLYSLEAIPLEDLLNNPFNYEVDHIIPRSVSFDNSFNNKVLVKQEENSKKGNRTPFQYLSSSDSKISYETFKKHILNLAKGKGRISKTKKEYLLEERDINRFSVQKDFINRNLVDTRYATRGLMNLLRSYFRVNNLDVKVKSINGGFTSFLRRKWKFKKERNKGYKHHAEDALIIANADFIFKEWKKLDKAKKVMENQMFEEKQAESMPEIETEQEYKEIFITPHQIKHIKDFKDYKYSHRVDKKPNRELINDTLYSTRKDDKGNTLIVNNLNGLYDKDNDKLKKLINKSPEKLLMYHHDPQTYQKLKLIMEQYGDEKNPLYKYYEETGNYLTKYSKKDNGPVIKKIKYYGNKLNAHLDITDDYPNSRNKVVKLSLKPYRFDVYLDNGVYKFVTVKNLDVIKKENYYEVNSKCYEEAKKLKKISNQAEFIASFYNNDLIKINGELYRVIGVNNDLLNRIEVNMIDITYREYLENMNDKRPPRIIKTIASKTQSIKKYSTDILGNLYEVKSKKHPQIIKKG

SEQ ID NO: 11 - protein, 1082 aa, Geobacillus thermodenitrificans
MKYKIGLDIGITSIGWAVINLDIPRIEDLGVRIFDRAENPKTGESLALPRRLARSARRRLRRRKHRLERIRRLFVREGILTKEELNKLFEKKHEIDVWQLRVEALDRKLNNDELARILLHLAKRRGFRSNRKSERTNKENSTMLKHIEENQSILSSYRTVAEMVVKDPKFSLHKRNKEDNYTNTVARDDLEREIKLIFAKQREYGNIVCTEAFEHEYISIWASQRPFASKDDIEKKVGFCTFEPKEKRAPKATYTFQSFTVWEHINKLRLVSPGGIRALTDDERRLIYKQAFHKNKITFHDVRTLLNLPDDTRFKGLLYDRNTTLKENEKVRFLELGAYHKIRKAIDSVYGKGAAKSFRPIDFDTFGYALTMFKDDTDIRSYLRNEYEQNGKRMENLADKVYDEELIEELLNLSFSKFGHLSLKALRNILPYMEQGEVYSTACERAGYTFTGPKKKQKTVLLPNIPPIANPVVMRALTQARKVVNAIIKKYGSPVSIHIELARELSQSFDERRKMQKEQEGNRKKNETAIRQLVEYGLTLNPTGLDIVKFKLWSEQNGKCAYSLQPIEIERLLEPGYTEVDHVIPYSRSLDDSYTNKVLVLTKENREKGNRTPAEYLGLGSERWQQFETFVLTNKQFSKKKRDRLLRLHYDENEENEFKNRNLNDTRYISRFLANFIREHLKFADSDDKQKVYTVNGRITAHLRSRWNFNKNREESNLHHAVDAAIVACTTPSDIARVTAFYQRREQNKELSKKTDPQFPQPWPHFADELQARLSKNPKESIKALNLGNYDNEKLESLQPVFVSRMPKRSITGAAHQETLRRYIGIDERSGKIQTVVKKKLSEIQLDKTGHFPMYGKESDPRTYEAIRQRLLEHNNDPKKAFQEPLYKPKKNGELGPIIRTIKIIDTTNQVIPLNDGKTVAYNSNIVRVDVFEKDGKYYCVPIYTIDMMKGILPNKAIEPNKPYSEWKEMTEDYTFRFSLYPNDLIRIEFPREKTIKTAVGEEIKIKDLFAYYQTIDSSNGGLSLVSHDNNFSLRSIGSRTLKRFEKYQVDVLGNIYKVRGEKRVGVASSSHSKAGETIRPL

SEQ ID NO: 12 - protein, 1387 aa, Artificial Sequence
  Synthetic
DYKVYDVRKMIAKSEQEIGKATAKYFFYSNIMNFFKTEITLANGEIRKRPLIETNGETGEIVWDKGRDFATVRKVLSMPQVNIVKKTEVQTGGFSKESILPKRNSDKLIARKKDWDPKKYGGFDSPTVAYSVLVVAKVEKGKSKKLKSVKELLGITIMERSSFEKNPIDFLEAKGYKEVKKDLIIKLPKYSLFELENGRKRMLASAGELQKGNELALPSKYVNFLYLASHYEKLKGSPEDNEQKQLFVEQHKHYLDEIIEQISEFSKRVILADANLDKVLSAYNKHRDKPIREQAENIIHLFTLTNLGAPAAFKYFDTTIDRKRYTSTKEVLDATLIHQSITGLYETRIDLSQLGGDGGSGGSGGSGGSGGSGGSGGDKKYSIGLAIGTNSVGWAVITDEYKVPSKKFKVLGNTDRHSIKKNLIGALLFDSGETAEATRLKRTARRRYTRRKNRICYLQEIFSNEMAKVDDSFFHRLEESFLVEEDKKHERHPIFGNIVDEVAYHEKYPTIYHLRKKLVDSTDKADLRLIYLALAHMIKFRGHFLIEGDLNPDNSDVDKLFIQLVQTYNQLFEENPINASGVDAKAILSARLSKSRRLENLIAQLPGEKKNGLFGNLIALSLGLTPNFKSNFDLAEDAKLQLSKDTYDDDLDNLLAQIGDQYADLFLAAKNLSDAILLSDILRVNTEITKAPLSASMIKRYDEHHQDLTLLKALVRQQLPEKYKEIFFDQSKNGYAGYIDGGASQEEFYKFIKPILEKMDGTEELLVKLNREDLLRKQRTFDNGSIPHQIHLGELHAILRRQEDFYPFLKDNREKIEKILTFRIPYYVGPLARGNSRFAWMTRKSEETITPWNFEEVVDKGASAQSFIERMTNFDKNLPNEKVLPKHSLLYEYFTVYNELTKVKYVTEGMRKPAFLSGEQKKAIVDLLFKTNRKVTVKQLKEDYFKKIECFDSVEISGVEDRFNASLGTYHDLLKIIKDKDFLDNEENEDILEDIVLTLTLFEDREMIEERLKTYAHLFDDKVMKQLKRRRYTGWGRLSRKLINGIRDKQSGKTILDFLKSDGFANRNFMQLIHDDSLTFKEDIQKAQVSGQGDSLHEHIANLAGSPAIKKGILQTVKVVDELVKVMGRHKPENIVIEMARENQTTQKGQKNSRERMKRIEEGIKELGSQILKEHPVENTQLQNEKLYLYYLQNGRDMYVDQELDINRLSDYDVDHIVPQSFLKDDSIDNKVLTRSDKNRGKSDNVPSEEVVKKMKNYWRQLLNAKLITQRKFDNLTKAERGGLSELDKAGFIKRQLVETRQITKHVAQILDSRMNTKYDENDKLIREVKVITLKSKLVSDFRKDFQFYKVREINNYHHAHDAYLNAVVGTALIKKYPKLESEFVYG

SEQ ID NO: 13 - protein, 1388 aa, Artificial Sequence
  Synthetic
EIGKATAKYFFYSNIMNFFKTEITLANGEIRKRPLIETNGETGEIVWDKGRDFATVRKVLSMPQVNIVKKTEVQTGGFSKESILPKRNSDKLIARKKDWDPKKYGGFDSPTVAYSVLVVAKVEKGKSKKLKSVKELLGITIMERSSFEKNPIDFLEAKGYKEVKKDLIIKLPKYSLFELENGRKRMLASAGELQKGNELALPSKYVNFLYLASHYEKLKGSPEDNEQKQLFVEQHKHYLDEIIEQISEFSKRVILADANLDKVLSAYNKHRDKPIREQAENIIHLFTLTNLGAPAAFKYFDTTIDRKRYTSTKEVLDATLIHQSITGLYETRIDLSQLGGDGGSGGSGGSGGSGGSGGSGGMDKKYSIGLAIGTNSVGWAVITDEYKVPSKKFKVLGNTDRHSIKKNLIGALLFDSGETAEATRLKRTARRRYTRRKNRICYLQEIFSNEMAKVDDSFFHRLEESFLVEEDKKHERHPIFGNIVDEVAYHEKYPTIYHLRKKLVDSTDKADLRLIYLALAHMIKFRGHFLIEGDLNPDNSDVDKLFIQLVQTYNQLFEENPINASGVDAKAILSARLSKSRRLENLIAQLPGEKKNGLFGNLIALSLGLTPNFKSNFDLAEDAKLQLSKDTYDDDLDNLLAQIGDQYADLFLAAKNLSDAILLSDILRVNTEITKAPLSASMIKRYDEHHQDLTLLKALVRQQLPEKYKEIFFDQSKNGYAGYIDGGASQEEFYKFIKPILEKMDGTEELLVKLNREDLLRKQRTFDNGSIPHQIHLGELHAILRRQEDFYPFLKDNREKIEKILTFRIPYYVGPLARGNSRFAWMTRKSEETITPWNFEEVVDKGASAQSFIERMTNFDKNLPNEKVLPKHSLLYEYFTVYNELTKVKYVTEGMRKPAFLSGEQKKAIVDLLFKTNRKVTVKQLKEDYFKKIECFDSVEISGVEDRFNASLGTYHDLLKIIKDKDFLDNEENEDILEDIVLTLTLFEDREMIEERLKTYAHLFDDKVMKQLKRRRYTGWGRLSRKLINGIRDKQSGKTILDFLKSDGFANRNFMQLIHDDSLTFKEDIQKAQVSGQGDSLHEHIANLAGSPAIKKGILQTVKVVDELVKVMGRHKPENIVIEMARENQTTQKGQKNSRERMKRIEEGIKELGSQILKEHPVENTQLQNEKLYLYYLQNGRDMYVDQELDINRLSDYDVDHIVPQSFLKDDSIDNKVLTRSDKNRGKSDNVPSEEVVKKMKNYWRQLLNAKLITQRKFDNLTKAERGGLSELDKAGFIKRQLVETRQITKHVAQILDSRMNTKYDENDKLIREVKVITLKSKLVSDFRKDFQFYKVREINNYHHAHDAYLNAVVGTALIKKYPKLESEFVYGDYKVYDVRKMIAKSEQ

SEQ ID NO: 14 - protein, 1387 aa, Artificial Sequence
  Synthetic
NIMNFFKTEITLANGEIRKRPLIETNGETGEIVWDKGRDFATVRKVLSMPQVNIVKKTEVQTGGFSKESILPKRNSDKLIARKKDWDPKKYGGFDSPTVAYSVLVVAKVEKGKSKKLKSVKELLGITIMERSSFEKNPIDFLEAKGYKEVKKDLIIKLPKYSLFELENGRKRMLASAGELQKGNELALPSKYVNFLYLASHYEKLKGSPEDNEQKQLFVEQHKHYLDEIIEQISEFSKRVILADANLDKVLSAYNKHRDKPIREQAENIIHLFTLTNLGAPAAFKYFDTTIDRKRYTSTKEVLDATLIHQSITGLYETRIDLSQLGGDGGSGGSGGSGGSGGSGGSGGDKKYSIGLAIGTNSVGWAVITDEYKVPSKKFKVLGNTDRHSIKKNLIGALLFDSGETAEATRLKRTARRRYTRRKNRICYLQEIFSNEMAKVDDSFFHRLEESFLVEEDKKHERHPIFGNIVDEVAYHEKYPTIYHLRKKLVDSTDKADLRLIYLALAHMIKFRGHFLIEGDLNPDNSDVDKLFIQLVQTYNQLFEENPINASGVDAKAILSARLSKSRRLENLIAQLPGEKKNGLFGNLIALSLGLTPNFKSNFDLAEDAKLQLSKDTYDDDLDNLLAQIGDQYADLFLAAKNLSDAILLSDILRVNTEITKAPLSASMIKRYDEHHQDLTLLKALVRQQLPEKYKEIFFDQSKNGYAGYIDGGASQEEFYKFIKPILEKMDGTEELLVKLNREDLLRKQRTFDNGSIPHQIHLGELHAILRRQEDFYPFLKDNREKIEKILTFRIPYYVGPLARGNSRFAWMTRKSEETITPWNFEEVVDKGASAQSFIERMTNFDKNLPNEKVLPKHSLLYEYFTVYNELTKVKYVTEGMRKPAFLSGEQKKAIVDLLFKTNRKVTVKQLKEDYFKKIECFDSVEISGVEDRFNASLGTYHDLLKIIKDKDFLDNEENEDILEDIVLTLTLFEDREMIEERLKTYAHLFDDKVMKQLKRRRYTGWGRLSRKLINGIRDKQSGKTILDFLKSDGFANRNFMQLIHDDSLTFKEDIQKAQVSGQGDSLHEHIANLAGSPAIKKGILQTVKVVDELVKVMGRHKPENIVIEMARENQTTQKGQKNSRERMKRIEEGIKELGSQILKEHPVENTQLQNEKLYLYYLQNGRDMYVDQELDINRLSDYDVDHIVPQSFLKDDSIDNKVLTRSDKNRGKSDNVPSEEVVKKMKNYWRQLLNAKLITQRKFDNLTKAERGGLSELDKAGFIKRQLVETRQITKHVAQILDSRMNTKYDENDKLIREVKVITLKSKLVSDFRKDFQFYKVREINNYHHAHDAYLNAVVGTALIKKYPKLESEFVYGDYKVYDVRKMIAKSEQEIGKATAKYFFYS

SEQ ID NO: 15 - protein, 1388 aa, Artificial Sequence
  Synthetic
PEDNEQKQLFVEQHKHYLDEIIEQISEFSKRVILADANLDKVLSAYNKHRDKPIREQAENIIHLFTLTNLGAPAAFKYFDTTIDRKRYTSTKEVLDATLIHQSITGLYETRIDLSQLGGDGGSGGSGGSGGSGGSGGSGGMDKKYSIGLAIGTNSVGWAVITDEYKVPSKKFKVLGNTDRHSIKKNLIGALLFDSGETAEATRLKRTARRRYTRRKNRICYLQEIFSNEMAKVDDSFFHRLEESFLVEEDKKHERHPIFGNIVDEVAYHEKYPTIYHLRKKLVDSTDKADLRLIYLALAHMIKFRGHFLIEGDLNPDNSDVDKLFIQLVQTYNQLFEENPINASGVDAKAILSARLSKSRRLENLIAQLPGEKKNGLFGNLIALSLGLTPNFKSNFDLAEDAKLQLSKDTYDDDLDNLLAQIGDQYADLFLAAKNLSDAILLSDILRVNTEITKAPLSASMIKRYDEHHQDLTLLKALVRQQLPEKYKEIFFDQSKNGYAGYIDGGASQEEFYKFIKPILEKMDGTEELLVKLNREDLLRKQRTFDNGSIPHQIHLGELHAILRRQEDFYPFLKDNREKIEKILTFRIPYYVGPLARGNSRFAWMTRKSEETITPWNFEEVVDKGASAQSFIERMTNFDKNLPNEKVLPKHSLLYEYFTVYNELTKVKYVTEGMRKPAFLSGEQKKAIVDLLFKTNRKVTVKQLKEDYFKKIECFDSVEISGVEDRFNASLGTYHDLLKIIKDKDFLDNEENEDILEDIVLTLTLFEDREMIEERLKTYAHLFDDKVMKQLKRRRYTGWGRLSRKLINGIRDKQSGKTILDFLKSDGFANRNFMQLIHDDSLTFKEDIQKAQVSGQGDSLHEHIANLAGSPAIKKGILQTVKVVDELVKVMGRHKPENIVIEMARENQTTQKGQKNSRERMKRIEEGIKELGSQILKEHPVENTQLQNEKLYLYYLQNGRDMYVDQELDINRLSDYDVDHIVPQSFLKDDSIDNKVLTRSDKNRGKSDNVPSEEVVKKMKNYWRQLLNAKLITQRKFDNLTKAERGGLSELDKAGFIKRQLVETRQITKHVAQILDSRMNTKYDENDKLIREVKVITLKSKLVSDFRKDFQFYKVREINNYHHAHDAYLNAVVGTALIKKYPKLESEFVYGDYKVYDVRKMIAKSEQEIGKATAKYFFYSNIMNFFKTEITLANGEIRKRPLIETNGETGEIVWDKGRDFATVRKVLSMPQVNIVKKTEVQTGGFSKESILPKRNSDKLIARKKDWDPKKYGGFDSPTVAYSVLVVAKVEKGKSKKLKSVKELLGITIMERSSFEKNPIDFLEAKGYKEVKKDLIIKLPKYSLFELENGRKRMLASAGELQKGNELALPSKYVNFLYLASHYEKLKGS

SEQ ID NO: 16 - protein, 1387 aa, Artificial Sequence
  Synthetic
KPIREQAENIIHLFTLTNLGAPAAFKYFDTTIDRKRYTSTKEVLDATLIHQSITGLYETRIDLSQLGGDGGSGGSGGSGGSGGSGGSGGDKKYSIGLAIGTNSVGWAVITDEYKVPSKKFKVLGNTDRHSIKKNLIGALLFDSGETAEATRLKRTARRRYTRRKNRICYLQEIFSNEMAKVDDSFFHRLEESFLVEEDKKHERHPIFGNIVDEVAYHEKYPTIYHLRKKLVDSTDKADLRLIYLALAHMIKFRGHFLIEGDLNPDNSDVDKLFIQLVQTYNQLFEENPINASGVDAKAILSARLSKSRRLENLIAQLPGEKKNGLFGNLIALSLGLTPNFKSNFDLAEDAKLQLSKDTYDDDLDNLLAQIGDQYADLFLAAKNLSDAILLSDILRVNTEITKAPLSASMIKRYDEHHQDLTLLKALVRQQLPEKYKEIFFDQSKNGYAGYIDGGASQEEFYKFIKPILEKMDGTEELLVKLNREDLLRKQRTFDNGSIPHQIHLGELHAILRRQEDFYPFLKDNREKIEKILTFRIPYYVGPLARGNSRFAWMTRKSEETITPWNFEEVVDKGASAQSFIERMTNFDKNLPNEKVLPKHSLLYEYFTVYNELTKVKYVTEGMRKPAFLSGEQKKAIVDLLFKTNRKVTVKQLKEDYFKKIECFDSVEISGVEDRFNASLGTYHDLLKIIKDKDFLDNEENEDILEDIVLTLTLFEDREMIEERLKTYAHLFDDKVMKQLKRRRYTGWGRLSRKLINGIRDKQSGKTILDFLKSDGFANRNFMQLIHDDSLTFKEDIQKAQVSGQGDSLHEHIANLAGSPAIKKGILQTVKVVDELVKVMGRHKPENIVIEMARENQTTQKGQKNSRERMKRIEEGIKELGSQILKEHPVENTQLQNEKLYLYYLQNGRDMYVDQELDINRLSDYDVDHIVPQSFLKDDSIDNKVLTRSDKNRGKSDNVPSEEVVKKMKNYWRQLLNAKLITQRKFDNLTKAERGGLSELDKAGFIKRQLVETRQITKHVAQILDSRMNTKYDENDKLIREVKVITLKSKLVSDFRKDFQFYKVREINNYHHAHDAYLNAVVGTALIKKYPKLESEFVYGDYKVYDVRKMIAKSEQEIGKATAKYFFYSNIMNFFKTEITLANGEIRKRPLIETNGETGEIVWDKGRDFATVRKVLSMPQVNIVKKTEVQTGGFSKESILPKRNSDKLIARKKDWDPKKYGGFDSPTVAYSVLVVAKVEKGKSKKLKSVKELLGITIMERSSFEKNPIDFLEAKGYKEVKKDLIIKLPKYSLFELENGRKRMLASAGELQKGNELALPSKYVNFLYLASHYEKLKGSPEDNEQKQLFVEQHKHYLDEIIEQISEFSKRVILADANLDKVLSAYNKHRD

SEQ ID NO: 17 - protein, 357 aa, Artificial Sequence
  Synthetic
DYKVYDVRKMIAKSEQEIGKATAKYFFYSNIMNFFKTEITLANGEIRKRPLIETNGETGEIVWDKGRDFATVRKVLSMPQVNIVKKTEVQTGGFSKESILPKRNSDKLIARKKDWDPKKYGGFDSPTVAYSVLVVAKVEKGKSKKLKSVKELLGITIMERSSFEKNPIDFLEAKGYKEVKKDLIIKLPKYSLFELENGRKRMLASAGELQKGNELALPSKYVNFLYLASHYEKLKGSPEDNEQKQLFVEQHKHYLDEIIEQISEFSKRVILADANLDKVLSAYNKHRDKPIREQAENIIHLFTLTNLGAPAAFKYFDTTIDRKRYTSTKEVLDATLIHQSITGLYETRIDLSQLGGD

SEQ ID NO: 18 - protein, 341 aa, Artificial Sequence
  Synthetic
EIGKATAKYFFYSNIMNFFKTEITLANGEIRKRPLIETNGETGEIVWDKGRDFATVRKVLSMPQVNIVKKTEVQTGGFSKESILPKRNSDKLIARKKDWDPKKYGGFDSPTVAYSVLVVAKVEKGKSKKLKSVKELLGITIMERSSFEKNPIDFLEAKGYKEVKKDLIIKLPKYSLFELENGRKRMLASAGELQKGNELALPSKYVNFLYLASHYEKLKGSPEDNEQKQLFVEQHKHYLDEIIEQISEFSKRVILADANLDKVLSAYNKHRDKPIREQAENIIHLFTLTNLGAPAAFKYFDTTIDRKRYTSTKEVLDATLIHQSITGLYETRIDLSQLGGD

SEQ ID NO: 19 - protein, 328 aa, Artificial Sequence
  Synthetic
NIMNFFKTEITLANGEIRKRPLIETNGETGEIVWDKGRDFATVRKVLSMPQVNIVKKTEVQTGGFSKESILPKRNSDKLIARKKDWDPKKYGGFDSPTVAYSVLVVAKVEKGKSKKLKSVKELLGITIMERSSFEKNPIDFLEAKGYKEVKKDLIIKLPKYSLFELENGRKRMLASAGELQKGNELALPSKYVNFLYLASHYEKLKGSPEDNEQKQLFVEQHKHYLDEIIEQISEFSKRVILADANLDKVLSAYNKHRDKPIREQAENIIHLFTLTNLGAPAAFKYFDTTIDRKRYTSTKEVLDATLIHQSITGLYETRIDLSQLGGD

SEQ ID NO: 20 - protein, 120 aa, Artificial Sequence
  Synthetic
PEDNEQKQLFVEQHKHYLDEIIEQISEFSKRVILADANLDKVLSAYNKHRDKPIREQAENIIHLFTLTNLGAPAAFKYFDTTIDRKRYTSTKEVLDATLIHQSITGLYETRIDLSQLGGD

SEQ ID NO: 21 - protein, 69 aa, Artificial Sequence
  Synthetic
KPIREQAENIIHLFTLTNLGAPAAFKYFDTTIDRKRYTSTKEVLDATLIHQSITGLYETRIDLSQLGGD

SEQ ID NO: 22 - protein, 1368 aa, Artificial Sequence
  Synthetic
MDKKYSIGLDIGTNSVGWAVITDEYKVPSKKFKVLGNTDRHSIKKNLIGALLFDSGETAEATRLKRTARRRYTRRKNRICYLQEIFSNEMAKVDDSFFHRLEESFLVEEDKKHERHPIFGNIVDEVAYHEKYPTIYHLRKKLVDSTDKADLRLIYLALAHMIKFRGHFLIEGDLNPDNSDVDKLFIQLVQTYNQLFEENPINASGVDAKAILSARLSKSRRLENLIAQLPGEKKNGLFGNLIALSLGLTPNFKSNFDLAEDAKLQLSKDTYDDDLDNLLAQIGDQYADLFLAAKNLSDAILLSDILRVNTEITKAPLSASMVKRYDEHHQDLTLLKALVRQQLPEKYKEIFFDQSKNGYAGYIDGGASQEEFYKFIKPILEKMDGTEELLVKLNREDLLRKQRTFDNGIIPHQIHLGELHAILRRQGDFYPFLKDNREKIEKILTFRIPYYVGPLARGNSRFAWMTRKSEETITPWNFEEVVDKGASAQSFIERMTNFDKNLPNEKVLPKHSLLYEYFTVYNELTKVKYVTEGMRKPAFLSGEQKKAIVDLLFKTNRKVTVKQLKEDYFKKIECFDSVEISGVEDRFNASLGTYHDLLKIIKDKDFLDNEENEDILEDIVLTLTLFEDREMIEERLKTYAHLFDDKVMKQLKRLRYTGWGRLSRKLINGIRDKQSGKTILDFLKSDGFANRNFMQLIHDDSLTFKEDIQKAQVSGQGDSLHEHIANLAGSPAIKKGILQTVKVVDELVKVMGGHKPENIVIEMARENQTTQKGQKNSRERMKRIEEGIKELGSQILKEHPVENTQLQNEKLYLYYLQNGRDMYVDQELDINRLSDYDVDHIVPQSFLKDDSIDNKVLTRSDKNRGKSDNVPSEEVVKKMKNYWRQLLNAKLITQRKFDNLTKAERGGLSELDKAGFIKRQLVETRQITKHVAQILDSRMNTKYDENDKLIREVKVITLKSKLVSDFRKDFQFYKVREINNYHHAHDAYLNAVVGTALIKKYPKLESEFVYGDYKVYDVRKMIAKSEQEIGKATAKYFFYSNIMNFFKTEITLANGEIRKRPLIETNGETGEIVWDKGRDFATVRKVLSMPQVNIVKKTEVQTGGFSKESILPKGNSDKLIARKKDWDPKKYGGFNSPTAAYSVLVVAKVEKGKSKKLKSVKELLGITIMERSSFEKNPIGFLEAKGYKEVKKDLIIKLPKYSLFELENGRKRMLASAGVLHKGNELALPSKYVNFLYLASHYEKLKGSPEDNEQKQLFVEQHKHYLDEIIEQISEFSKRVILADANLDKVLSAYNKHRDKPIREQAENIIHLFTLTNLGVPAAFKYFDTTIDKKRYTSTKEVLDATLIHQSITGLYETRIDLSQLGGD

SEQ ID NO: 23 - protein, 1368 aa, Artificial Sequence
  Synthetic
MDKKYSIGLDIGTNSVGWAVITDEYKVPSKKFKVLGNTDRHSIKKNLIGALLFDSGETAEATRLKRTARRRYTRRKNRICYLQEIFSNEMAKVDDSFFHRLEESFLVEEDKKHERHPIFGNIVDEVAYHEKYPTIYHLRKKLVDSTDKADLRLIYLALAHMIKFRGHFLIEGDLNPDNSDVDKLFIQLVQTYNQLFEENPINASGVDAKAILSARLSKSRRLENLIAQLPGEKKNGLFGNLIALSLGLTPNFKSNFDLAEDAKLQLSKDTYDDDLDNLLAQIGDQYADLFLAAKNLSDAILLSDILRVNTEITKAPLSASMVKRYDEHHQDLTLLKALVRQQLPEKYKEIFFDQSKNGYAGYIDGGASQEEFYKFIKPILEKMDGTEELLVKLNREDLLRKQRTFDNGIIPHQIHLGELHAILRRQGDFYPFLKDNREKIEKILTFRIPYYVGPLARGNSRFAWMTRKSEETITPWNFEEVVDKGASAQSFIERMTNFDKNLPNEKVLPKHSLLYEYFTVYNELTKVKYVTEGMRKPAFLSGEQKKAIVDLLFKTNRKVTVKQLKEDYFKKIECFDSVEISGVEDRFNASLGTYHDLLKIIKDKDFLDNEENEDILEDIVLTLTLFEDREMIEERLKTYAHLFDDKVMKQLKRLRYTGWGRLSRKLINGIRDKQSGKTILDFLKSDGFANRNFMQLIHDDSLTFKEDIQKAQVSGQGDSLHEHIANLAGSPAIKKGILQTVKVVDELVKVMGGHKPENIVIEMARENQTTQKGQKNSRERMKRIEEGIKELGSQILKEHPVENTQLQNEKLYLYYLQNGRDMYVDQELDINRLSDYDVDHIVPQSFLKDDSIDNKVLTRSDKNRGKSDNVPSEEVVKKMKNYWRQLLNAKLITQRKFDNLTKAERGGLSELDKAGFIKRQLVETRQITKHVAQILDSRMNTKYDENDKLIREVKVITLKSKLVSDFRKDFQFYKVREINNYHHAHDAYLNAVVGTALIKKYPKLESEFVYGDYKVYDVRKMIAKSEQEIGKATAKYFFYSNIMNFFKTEITLANGEIRKRPLIETNGETGEIVWDKGRDFATVRKVLSMPQVNIVKKTEVQTGGFSKESILPKGNSDKLIARKKDWDPKKYGGFNSPTVAYSVLVVAKVEKGKSKKLKSVKELLGITIMERSSFEKNPIDFLEAKGYKEVKKDLIIKLPKYSLFELENGRKRMLASAGVLQKGNELALPSKYVNFLYLASHYEKLKGSPEDNEQKQLFVEQHKHYLDEIIEQISEFSKRVILADANLDKVLSAYNKHRDKPIREQAENIIHLFTLTNLGAPAAFKYFDTTINRKQYNTTKEVLDATLIRQSITGLYETRIDLSQLGGD

SEQ ID NO: 24 - protein, 1368 aa, Artificial Sequence
  Synthetic
MDKKYSIGLDIGTNSVGWAVITDEYKVPSKKFKVLGNTDRHSIKKNLIGALLFDSGETAEATRLKRTARRRYTRRKNRICYLQEIFSNEMAKVDDSFFHRLEESFLVEEDKKHERHPIFGNIVDEVAYHEKYPTIYHLRKKLVDSTDKADLRLIYLALAHMIKFRGHFLIEGDLNPDNSDVDKLFIQLVQTYNQLFEENPINASGVDAKAILSARLSKSRRLENLIAQLPGEKKNGLFGNLIALSLGLTPNFKSNFDLAEDAKLQLSKDTYDDDLDNLLAQIGDQYADLFLAAKNLSDAILLSDILRVNTEITKAPLSASMVKRYDEHHQDLTLLKALVRQQLPEKYKEIFFDQSKNGYAGYIDGGASQEEFYKFIKPILEKMDGTEELLVKLNREDLLRKQRTFDNGIIPHQIHLGELHAILRRQGDFYPFLKDNREKIEKILTFRIPYYVGPLARGNSRFAWMTRKSEETITPWNFEEVVDKGASAQSFIERMTNFDKNLPNEKVLPKHSLLYEYFTVYNELTKVKYVTEGMRKPAFLSGEQKKAIVDLLFKTNRKVTVKQLKEDYFKKIECFDSVEISGVEDRFNASLGTYHDLLKIIKDKDFLDNEENEDILEDIVLTLTLFEDREMIEERLKTYAHLFDDKVMKQLKRLRYTGWGRLSRKLINGIRDKQSGKTILDFLKSDGFANRNFMQLIHDDSLTFKEDIQKAQVSGQGDSLHEHIANLAGSPAIKKGILQTVKVVDELVKVMGGHKPENIVIEMARENQTTQKGQKNSRERMKRIEEGIKELGSQILKEHPVENTQLQNEKLYLYYLQNGRDMYVDQELDINRLSDYDVDHIVPQSFLKDDSIDNKVLTRSDKNRGKSDNVPSEEVVKKMKNYWRQLLNAKLITQRKFDNLTKAERGGLSELDKAGFIKRQLVETRQITKHVAQILDSRMNTKYDENDKLIREVKVITLKSKLVSDFRKDFQFYKVREINNYHHAHDAYLNAVVGTALIKKYPKLESEFVYGDYKVYDVRKMIAKSEQEIGKATAKYFFYSNIMNFFKTEITLANGEIRKRPLIETNGETGEIVWDKGRDFATVRKVLSMPQVNIVKKTEVQTGGFSKESILPKGNSDKLIARKKDWDPKKYGGFNSPTVAYSVLVVAKVEKGKSKKLKSVKELLGITIMERSSFEKNPIGFLEAKGYKEVKKDLIIKLPKYSLFELENGRKRMLASASVLHKGNELALPSKYVNFLYLASHYEKLKGSSEDNKQKQLFVEQHKHYLDEIIEQISEFSKRVILADANLDKVLSAYNKHRDKPIREQAENIIHLFTLTNLGASAAFKYFDTTIGRKLYTSTKEVLDATLIHQSITGLYETRIDLSQLGGD

SEQ ID NO: 25 - protein, 1368 aa, Artificial Sequence
  Synthetic
MDKKYSIGLDIGTNSVGWAVITDEYKVPSKKFKVLGNTDRHSIKKNLIGALLFDSGETAEATRLKRTARRRYTRRKNRICYLQEIFSNEMAKVDDSFFHRLEESFLVEEDKKHERHPIFGNIVDEVAYHEKYPTIYHLRKKLVDSTDKADLRLIYLALAHMIKFRGHFLIEGDLNPDNSDVDKLFIQLVQTYNQLFEENPINASGVDAKAILSARLSKSRRLENLIAQLPGEKKNGLFGNLIALSLGLTPNFKSNFDLAEDAKLQLSKDTYDDDLDNLLAQIGDQYADLFLAAKNLSDAILLSDILRVNTEITKAPLSASMIKRYDEHHQDLTLLKALVRQQLPEKYKEIFFDQSKNGYAGYIDGGASQEEFYKFIKPILEKMDGTEELLVKLNREDLLRKQRTFDNGSIPHQIHLGELHAILRRQEDFYPFLKDNREKIEKILTFRIPYYVGPLARGNSRFAWMTRKSEETITPWNFEEVVDKGASAQSFIERMTAFDKNLPNEKVLPKHSLLYEYFTVYNELTKVKYVTEGMRKPAFLSGEQKKAIVDLLFKTNRKVTVKQLKEDYFKKIECFDSVEISGVEDRFNASLGTYHDLLKIIKDKDFLDNEENEDILEDIVLTLTLFEDREMIEERLKTYAHLFDDKVMKQLKRRRYTGWGALSRKLINGIRDKQSGKTILDFLKSDGFANRNFMALIHDDSLTFKEDIQKAQVSGQGDSLHEHIANLAGSPAIKKGILQTVKVVDELVKVMGRHKPENIVIEMARENQTTQKGQKNSRERMKRIEEGIKELGSQILKEHPVENTQLQNEKLYLYYLQNGRDMYVDQELDINRLSDYDVDHIVPQSFLKDDSIDNKVLTRSDKNRGKSDNVPSEEVVKKMKNYWRQLLNAKLITQRKFDNLTKAERGGLSELDKAGFIKRQLVETRAITKHVAQILDSRMNTKYDENDKLIREVKVITLKSKLVSDFRKDFQFYKVREINNYHHAHDAYLNAVVGTALIKKYPKLESEFVYGDYKVYDVRKMIAKSEQEIGKATAKYFFYSNIMNFFKTEITLANGEIRKRPLIETNGETGEIVWDKGRDFATVRKVLSMPQVNIVKKTEVQTGGFSKESILPKRNSDKLIARKKDWDPKKYGGFDSPTVAYSVLVVAKVEKGKSKKLKSVKELLGITIMERSSFEKNPIDFLEAKGYKEVKKDLIIKLPKYSLFELENGRKRMLASAGELQKGNELALPSKYVNFLYLASHYEKLKGSPEDNEQKQLFVEQHKHYLDEIIEQISEFSKRVILADANLDKVLSAYNKHRDKPIREQAENIIHLFTLTNLGAPAAFKYFDTTIDRKRYTSTKEVLDATLIHQSITGLYETRIDLSQLGGD

SEQ ID NO: 26 - protein, 1368 aa, Artificial Sequence; identical to SEQ ID NO: 25
  Synthetic

SEQ ID NO: 27 - protein, 198 aa, Homo sapiens [sequence omitted]

SEQ ID NO: 28 - protein, 198 aa, Mus musculus
MDSLLMKQKKFLYHFKNVRWAKGRHETYLCYVVKRRDSATSCSLDFGHLRNKSGCHVELLFLRYISDWDLDPGRCYRVTWFTSWSPCYDCARHVAEFLRWNPNLSLRIFTARLYFCEDRKAEPEGLRRLHRAGVQIGIMTFKDYFYCWNTFVENRERTFKAWEGLHENSVRLTRQLRRILLPLYEVDDLRDAFRMLGF

SEQ ID NO: 29 - protein, 198 aa, AID Canis familiaris
MDSLLMKQRKFLYHFKNVRWAKGRHETYLCYVVKRRDSATSFSLDFGHLRNKSGCHVELLFLRYISDWDLDPGRCYRVTWFTSWSPCYDCARHVADFLRGYPNLSLRIFAARLYFCEDRKAEPEGLRRLHRAGVQIAIMTFKDYFYCWNTFVENREKTFKAWEGLHENSVRLSRQLRRILLPLYEVDDLRDAFRTLGL

SEQ ID NO: 30 - protein, 199 aa, Bos taurus
MDSLLKKQRQFLYQFKNVRWAKGRHETYLCYVVKRRDSPTSFSLDFGHLRNKAGCHVELLFLRYISDWDLDPGRCYRVTWFTSWSPCYDCARHVADFLRGYPNLSLRIFTARLYFCDKERKAEPEGLRRLHRAGVQIAIMTFKDYFYCWNTFVENHERTFKAWEGLHENSVRLSRQLRRILLPLYEVDDLRDAFRTLGL

SEQ ID NO: 31 - protein, 239 aa, Unknown
  Rattus
MAVGSKPKAALVGPHWERERIWCFLCSTGLGTQQTGQTSRWLRPAATQDPVSPPRSLLMKQRKFLYHFKNVRWAKGRHETYLCYVVKRRDSATSFSLDFGYLRNKSGCHVELLFLRYISDWDLDPGRCYRVTWFTSWSPCYDCARHVADFLRGNPNLSLRIFTARLTGWGALPAGLMSPARPSDYFYCWNTFVENHERTFKAWEGLHENSVRLSRRLRRILLPLYEVDDLRDAFRTLGL

SEQ ID NO: 32 - protein, 429 aa, Mus musculus
MGPFCLGCSHRKCYSPIRNLISQETFKFHFKNLGYAKGRKDTFLCYEVTRKDCDSPVSLHHGVFKNKDNIHAEICFLYWFHDKVLKVLSPREEFKITWYMSWSPCFECAEQIVRFLATHHNLSLDIFSSRLYNVQDPETQQNLCRLVQEGAQVAAMDLYEFKKCWKKFVDNGGRRFRPWKRLLTNFRYQDSKLQEILRPCYIPVPSSSSSTLSNICLTKGLPETRFCVEGRRMDPLSEEEFYSQFYNQRVKHLCYYHRMKPYLCYQLEQFNGQAPLKGCLLSEKGKQHAEILFLDKIRSMELSQVTITCYLTWSPCPNCAWQLAAFKRDRPDLILHIYTSRLYFHWKRPFQKGLCSLWQSGILVDVMDLPQFTDCWTNFVNPKRPFWPWKGLEIISRRTQRRLRRIKESWGLQDLVNDFGNLQLGPPMS

SEQ ID NO: 33 - protein, 429 aa, Unknown
  Rattus
MGPFCLGCSHRKCYSPIRNLISQETFKFHFKNLRYAIDRKDTFLCYEVTRKDCDSPVSLHHGVFKNKDNIHAEICFLYWFHDKVLKVLSPREEFKITWYMSWSPCFECAEQVLRFLATHHNLSLDIFSSRLYNIRDPENQQNLCRLVQEGAQVAAMDLYEFKKCWKKFVDNGGRRFRPWKKLLTNFRYQDSKLQEILRPCYIPVPSSSSSTLSNICLTKGLPETRFCVERRRVHLLSEEEFYSQFYNQRVKHLCYYHGVKPYLCYQLEQFNGQAPLKGCLLSEKGKQHAEILFLDKIRSMELSQVIITCYLTWSPCPNCAWQLAAFKRDRPDLILHIYTSRLYFHWKRPFQKGLCSLWQSGILVDVMDLPQFTDCWTNFVNPKRPFWPWKGLEIISRRTQRRLHRIKESWGLQDLVNDFGNLQLGPPMS

SEQ ID NO: 34 - protein, 370 aa, Macaca mulatta
MVEPMDPRTFVSNFNNRPILSGLNTVWLCCEVKTKDPSGPPLDAKIFQGKVYSKAKYHPEMRFLRWFHKWRQLHHDQEYKVTWYVSWSPCTRCANSVATFLAKDPKVTLTIFVARLYYFWKPDYQQALRILCQKRGGPHATMKIMNYNEFQDCWNKFVDGRGKPFKPRNNLPKHYTLLQATLGELLRHLMDPGTFTSNFNNKPWVSGQHETYLCYKVERLHNDTWVPLNQHRGFLRNQAPNIHGFPKGRHAELCFLDLIPFWKLDGQQYRVTCFTSWSPCFSCAQEMAKFISNNEHVSLCIFAARIYDDQGRYQEGLRALHRDGAKIAMMNYSEFEYCWDTFVDRQGRPFQPWDGLDEHSQALSGRLRAI

SEQ ID NO: 35 - protein, 384 aa, Pan troglodytes
MKPHFRNPVERMYQDTFSDNFYNRPILSHRNTVWLCYEVKTKGPSRPPLDAKIFRGQVYSKLKYHPEMRFFHWFSKWRKLHRDQEYEVTWYISWSPCTKCTRDVATFLAEDPKVTLTIFVARLYYFWDPDYQEALRSLCQKRDGPRATMKIMNYDEFQHCWSKFVYSQRELFEPWNNLPKYYILLHIMLGEILRHSMDPPTFTSNFNNELWVRGRHETYLCYEVERLHNDTWVLLNQRRGFLCNQAPHKHGFLEGRHAELCFLDVIPFWKLDLHQDYRVTCFTSWSPCFSCAQEMAKFISNNKHVSLCIFAARIYDDQGRCQEGLRTLAKAGAKISIMTYSEFKHCWDTFVDHQGCPFQPWDGLEEHSQALSGRLRAILQNQGN

SEQ ID NO: 36 - protein, 377 aa, Chlorocebus sabaeus
MNPQIRNMVEQMEPDIFVYYFNNRPILSGRNTVWLCYEVKTKDPSGPPLDANIFQGKLYPEAKDHPEMKFLHWFRKWRQLHRDQEYEVTWYVSWSPCTRCANSVATFLAEDPKVTLTIFVARLYYFWKPDYQQALRILCQERGGPHATMKIMNYNEFQHCWNEFVDGQGKPFKPRKNLPKHYTLLHATLGELLRHVMDPGTFTSNFNNKPWVSGQRETYLCYKVERSHNDTWVLLNQHRGFLRNQAPDRHGFPKGRHAELCFLDLIPFWKLDDQQYRVTCFTSWSPCFSCAQKMAKFISNNKHVSLCIFAARIYDDQGRCQEGLRTLHRDGAKIAVMNYSEFEYCWDTFVDRQGRPFQPWDGLDEHSQALSGRLRAI

SEQ ID NO: 37 - protein, 384 aa, Homo sapiens
MKPHFRNTVERMYRDTFSYNFYNRPILSRRNTVWLCYEVKTKGPSRPPLDAKIFRGQVYSELKYHPEMRFFHWFSKWRKLHRDQEYEVTWYISWSPCTKCTRDMATFLAEDPKVTLTIFVARLYYFWDPDYQEALRSLCQKRDGPRATMKIMNYDEFQHCWSKFVYSQRELFEPWNNLPKYYILLHIMLGEILRHSMDPPTFTFNFNNEPWVRGRHETYLCYEVERMHNDTWVLLNQRRGFLCNQAPHKHGFLEGRHAELCFLDVIPFWKLDLDQDYRVTCFTSWSPCFSCAQEMAKFISKNKHVSLCIFTARIYDDQGRCQEGLRTLAEAGAKISIMTYSEFKHCWDTFVDHQGCPFQPWDGLDEHSQDLSGRLRAILQNQEN

SEQ ID NO: 38 - protein, 373 aa, Homo sapiens
MKPHFRNTVERMYRDTFSYNFYNRPILSRRNTVWLCYEVKTKGPSRPRLDAKIFRGQVYSQPEHHAEMCFLSWFCGNQLPAYKCFQITWFVSWTPCPDCVAKLAEFLAEHPNVTLTISAARLYYYWERDYRRALCRLSQAGARVKIMDDEEFAYCWENFVYSEGQPFMPWYKFDDNYAFLHRTLKEILRNPMEAMYPHIFYFHFKNLRKAYGRNESWLCFTMEVVKHHSPVSWKRGVFRNQVDPETHCHAERCFLSWFCDDILSPNTNYEVTWYTSWSPCPECAGEVAEFLARHSNVNLTIFTARLYYFWDTDYQEGLRSLSQEGASVEIMGYKDFKYCWENFVYNDDEPFKPWKGLKYNFLFLDSKLQEILE

SEQ ID NO: 39 - protein, 382 aa, Homo sapiens
MNPQIRNPMERMYRDTFYDNFENEPILYGRSYTWLCYEVKIKRGRSNLLWDTGVFRGQVYFKPQYHAEMCFLSWFCGNQLPAYKCFQITWFVSWTPCPDCVAKLAEFLSEHPNVTLTISAARLYYYWERDYRRALCRLSQAGARVTIMDYEEFAYCWENFVYNEGQQFMPWYKFDENYAFLHRTLKEILRYLMDPDTFTFNFNNDPLVLRRRQTYLCYEVERLDNGTWVLMDQHMGFLCNEAKNLLCGFYGRHAELRFLDLVPSLQLDPAQIYRVTWFISWSPCFSWGCAGEVRAFLQENTHVRLRIFAARIYDYDPLYKEALQMLRDAGAQVSIMTYDEFEYCWDTFVYRQGCPFQPWDGLEEHSQALSGRLRAILQNQGN

SEQ ID NO: 40 - protein, 396 aa, Unknown
  Rattus
MQPQGLGPNAGMGPVCLGCSHRRPYSPIRNPLKKLYQQTFYFHFKNVRYAWGRKNNFLCYEVNGMDCALPVPLRQGVFRKQGHIHAELCFIYWFHDKVLRVLSPMEEFKVTWYMSWSPCSKCAEQVARFLAAHRNLSLAIFSSRLYYYLRNPNYQQKLCRLIQEGVHVAAMDLPEFKKCWNKFVDNDGQPFRPWMRLRINFSFYDCKLQEIFSRMNLLREDVFYLQFNNSHRVKPVQNRYYRRKSYLCYQLERANGQEPLKGYLLYKKGEQHVEILFLEKMRSMELSQVRITCYLTWSPCPNCARQLAAFKKDHPDLILRIYTSRLYFYWRKKFQKGLCTLWRSGIHVDVMDLPQFADCWTNFVNPQRPFRPWNELEKNSWRIQRRLRRIKESWGL

SEQ ID NO: 41 - protein, 227 aa, Bos taurus
DGWEVAFRSGTVLKAGVLGVSMTEGWAGSGHPGQGACVWTPGTRNTMNLLREVLFKQQFGNQPRVPAPYYRRKTYLCYQLKQRNDLTLDRGCFRNKKQRHAEIRFIDKINSLDLNPSQSYKIICYITWSPCPNCANELVNFITRNNHLKLEIFASRLYFHWIKSFKMGLQDLQNAGISVAVMTHTEFEDCWEQFVDNQSRPFQPWDKLEQYSASIRRRLQRILTAPI

SEQ ID NO: 42 - protein, 490 aa, Pan troglodytes
MNPQIRNPMEWMYQRTFYYNFENEPILYGRSYTWLCYEVKIRRGHSNLLWDTGVFRGQMYSQPEHHAEMCFLSWFCGNQLSAYKCFQITWFVSWTPCPDCVAKLAKFLAEHPNVTLTISAARLYYYWERDYRRALCRLSQAGARVKIMDDEEFAYCWENFVYNEGQPFMPWYKFDDNYAFLHRTLKEIIRHLMDPDTFTFNFNNDPLVLRRHQTYLCYEVERLDNGTWVLMDQHMGFLCNEAKNLLCGFYGRHAELRFLDLVPSLQLDPAQIYRVTWFISWSPCFSWGCAGQVRAFLQENTHVRLRIFAARIYDYDPLYKEALQMLRDAGAQVSIMTYDEFEYCWDTFVYRQGCPFQPWDGLEEHSQALSGRLRAILQVRASSLCMVPHRPPPPPQSPGPCLPLCSEPPLGSLLPTGRPAPSLPFLLTASFSFPPPASLPPLPSLSLSPGHLPVPSFHSLTSCSIQPPCSSRIRETEGWASVSKEGRDLG

SEQ ID NO: 43 - protein, 190 aa, Homo sapiens
MNPQIRNPMKAMYPGTFYFQFKNLWEANDRNETWLCFTVEGIKRRSVVSWKTGVFRNQVDSETHCHAERCFLSWFCDDILSPNTKYQVTWYTSWSPCPDCAGEVAEFLARHSNVNLTIFTARLYYFQYPCYQEGLRSLSQEGVAVEIMDYEDFKYCWENFVYNDNEPFKPWKGLKTNFRLLKRRLRESLQ

SEQ ID NO: 44 - protein, 190 aa, Gorilla gorilla
MNPQIRNPMKAMYPGTFYFQFKNLWEANDRNETWLCFTVEGIKRRSVVSWKTGVFRNQVDSETHCHAERCFLSWFCDDILSPNTNYQVTWYTSWSPCPECAGEVAEFLARHSNVNLTIFTARLYYFQDTDYQEGLRSLSQEGVAVKIMDYKDFKYCWENFVYNDDEPFKPWKGLKYNFRFLKRRLQEILE

SEQ ID NO: 45 - protein, 199 aa, Homo sapiens
MEASPASGPRHLMDPHIFTSNFNNGIGRHKTYLCYEVERLDNGTSVKMDQHRGFLHNQAKNLLCGFYGRHAELRFLDLVPSLQLDPAQIYRVTWFISWSPCFSWGCAGEVRAFLQENTHVRLRIFAARIYDYDPLYKEALQMLRDAGAQVSIMTYDEFKHCWDTFVDHQGCPFQPWDGLDEHSQALSGRLRAILQNQGN

SEQ ID NO: 46 - protein, 202 aa, Macaca mulatta
MDGSPASRPRHLMDPNTFTFNFNNDLSVRGRHQTYLCYEVERLDNGTWVPMDERRGFLCNKAKNVPCGDYGCHVELRFLCEVPSWQLDPAQTYRVTWFISWSPCFRRGCAGQVRVFLQENKHVRLRIFAARIYDYDPLYQEALRTLRDAGAQVSIMTYEEFKHCWDTFVDRQGRPFQPWDGLDEHSQALSGRLRAILQNQGN

SEQ ID NO: 47 - protein, 185 aa, Bos taurus
MDEYTFTENFNNQGWPSKTYLCYEMERLDGDATIPLDEYKGFVRNKGLDQPEKPCHAELYFLGKIHSWNLDRNQHYRLTCFISWSPCYDCAQKLTTFLKENHHISLHILASRIYTHNRFGCHQSGLCELQAAGARITIMTFEDFKHCWETFVDHKGKPFQPWEGLNVKSQALCTELQAILKTQQN

SEQ ID NO: 48 - protein, 200 aa, Homo sapiens
MALLTAETFRLQFNNKRRLRRPYYPRKALLCYQLTPQNGSTPTRGYFENKKKCHAEICFINEIKSMGLDETQCYQVTCYLTWSPCSSCAWELVDFIKAHDHLNLGIFASRLYYHWCKPQQKGLRLLCGSQVPVEVMGFPKFADCWENFVDHEKPLSFNPYKMLEELDKNSRAIKRRLERIKIPGVRAQGRYMDILCDAEV

SEQ ID NO: 49 - protein, 210 aa, Macaca mulatta
MALLTAKTFSLQFNNKRRVNKPYYPRKALLCYQLTPQNGSTPTRGHLKNKKKDHAEIRFINKIKSMGLDETQCYQVTCYLTWSPCPSCAGELVDFIKAHRHLNLRIFASRLYYHWRPNYQEGLLLLCGSQVPVEVMGLPEFTDCWENFVDHKEPPSFNPSEKLEELDKNSQAIKRRLERIKSRSVDVLENGLRSLQLGPVTPSSSIRNSR

SEQ ID NO: 50 - protein, 386 aa, Homo sapiens
MNPQIRNPMERMYRDTFYDNFENEPILYGRSYTWLCYEVKIKRGRSNLLWDTGVFRGPVLPKRQSNHRQEVYFRFENHAEMCFLSWFCGNRLPANRRFQITWFVSWNPCLPCVVKVTKFLAEHPNVTLTISAARLYYYRDRDWRWVLLRLHKAGARVKIMDYEDFAYCWENFVCNEGQPFMPWYKFDDNYASLHRTLKEILRNPMEAMYPHIFYFHFKNLLKACGRNESWLCFTMEVTKHHSAVFRKRGVFRNQVDPETHCHAERCFLSWFCDDILSPNTNYEVTWYTSWSPCPECAGEVAEFLARHSNVNLTIFTARLCYFWDTDYQEGLCSLSQEGASVKIMGYKDFVSCWKNFVYSDDEPFKPWKGLQTNFRLLKRRLREILQ

SEQ ID NO: 51 - protein, 236 aa, Homo sapiens
MTSEKGPSTGDPTLRRRIEPWEFDVFYDPRELRKEACLLYEIKWGMSRKIWRSSGKNTTNHVEVNFIKKFTSERDFHPSMSCSITWFLSWSPCWECSQAIREFLSRHPGVTLVIYVARLFWHMDQQNRQGLRDLVNSGVTIQIMRASEYYHCWRNFVNYPPGDEAHWPQYPPLWMMLYALELHCIILSLPPCLKISRRWQNHLTFFRLHLQNCHYQTIPPHILLATGLIHPSVAWR

SEQ ID NO: 52 - protein, 229 aa, Mus musculus
MSSETGPVAVDPTLRRRIEPHEFEVFFDPRELRKETCLLYEINWGGRHSVWRHTSQNTSNHVEVNFLEKFTTERYFRPNTRCSITWFLSWSPCGECSRAITEFLSRHPYVTLFIYIARLYHHTDQRNRQGLRDLISSGVTIQIMTEQEYCYCWRNFVNYPPSNEAYWPRYPHLWVKLYVLELYCIILGLPPCLKILRRKQPQLTFFTITLQTCHYQRIPPHLLWATGLK

SEQ ID NO: 53 - protein, 229 aa, Unknown [sequence omitted]

SEQ ID NO: 54 - protein, 224 aa, Homo sapiens
MAQKEEAAVATEAASQNGEDLENLDDPEKLKELIELPPFEIVTGERLPANFFKFQFRNVEYSSGRNKTFLCYVVEAQGKGGQVQASRGYLEDEHAAAHAEEAFFNTILPAFDPALRYNVTWYVSSSPCAACADRIIKTLSKTKNLRLLILVGRLFMWEEPEIQAALKKLKEAGCKLRIMKPQDFEYVWQNFVEQEEGESKAFQPWEDIQENFLYYEEKLADILK

SEQ ID NO: 55 - protein, 224 aa, Mus musculus
MAQKEEAAEAAAPASQNGDDLENLEDPEKLKELIDLPPFEIVTGVRLPVNFFKFQFRNVEYSSGRNKTFLCYVVEVQSKGGQAQATQGYLEDEHAGAHAEEAFFNTILPAFDPALKYNVTWYVSSSPCAACADRILKTLSKTKNLRLLILVSRLFMWEEPEVQAALKKLKEAGCKLRIMKPQDFEYIWQNFVEQEEGESKAFEPWEDIQENFLYYEEKLADILK

SEQ ID NO: 56 - protein, 224 aa, Unknown
  Rattus
MAQKEEAAEAAAPASQNGDDLENLEDPEKLKELIDLPPFEIVTGVRLPVNFFKFQFRNVEYSSGRNKTFLCYVVEAQSKGGQVQATQGYLEDEHAGAHAEEAFFNTILPAFDPALKYNVTWYVSSSPCAACADRILKTLSKTKNLRLLILVSRLFMWEEPEVQAALKKLKEAGCKLRIMKPQDFEYLWQNFVEQEEGESKAFEPWEDIQENFLYYEEKLADILK

SEQ ID NO: 57 - protein, 224 aa, Bos taurus
MAQKEEAAAAAEPASQNGEEVENLEDPEKLKELIELPPFEIVTGERLPAHYFKFQFRNVEYSSGRNKTFLCYVVEAQSKGGQVQASRGYLEDEHATNHAEEAFFNSIMPTFDPALRYMVTWYVSSSPCAACADRIVKTLNKTKNLRLLILVGRLFMWEEPEIQAALRKLKEAGCRLRIMKPQDFEYIWQNFVEQEEGESKAFEPWEDIQENFLYYEEKLADILK

SEQ ID NO: 58 - protein, 208 aa, Petromyzon marinus
MTDAEYVRIHEKLDIYTFKKQFFNNKKSVSHRCYVLFELKRRGERRACFWGYAVNKPQSGTERGIHAEIFSIRKVEEYLRDNPGQFTINWYSSWSPCADCAEKILEWYNQELRGNGHTLKIWACKLYYEKNARNQIGLWNLRDNGVGLNVMVSEHYQCCRKIFIQSSHNQLNENRWLEKTLKRAEKRRSELSIMIQVKILHTTKSPAV

SEQ ID NO: 59 - protein, 384 aa, Homo sapiens
MKPHFRNTVERMYRDTFSYNFYNRPILSRRNTVWLCYEVKTKGPSRPPLDAKIFRGQVYSELKYHPEMRFFHWFSKWRKLHRDQEYEVTWYISWSPCTKCTRDMATFLAEDPKVTLTIFVARLYYFWDPDYQEALRSLCQKRDGPRATMKIMNYDEFQHCWSKFVYSQRELFEPWNNLPKYYILLHIMLGEILRHSMDPPTFTFNFNNEPWVRGRHETYLCYEVERMHNDTWVLLNQRRGFLCNQAPHKHGFLEGRHAELCFLDVIPFWKLDLDQDYRVTCFTSWSPCFSCAQEMAKFISKNKHVSLCIFTARIYRRQGRCQEGLRTLAEAGAKISIMTYSEFKHCWDTFVDHQGCPFQPWDGLDEHSQDLSGRLRAILQNQEN

SEQ ID NO: 60 - protein, 184 aa, Homo sapiens
MDPPTFTFNFNNEPWVRGRHETYLCYEVERMHNDTWVLLNQRRGFLCNQAPHKHGFLEGRHAELCFLDVIPFWKLDLDQDYRVTCFTSWSPCFSCAQEMAKFISKNKHVSLCIFTARIYDDQGRCQEGLRTLAEAGAKISIMTYSEFKHCWDTFVDHQGCPFQPWDGLDEHSQDLSGRLRAILQ

SEQ ID NO: 61 - protein, 184 aa, Homo sapiens
MDPPTFTFNFNNEPWVRGRHETYLCYEVERMHNDTWVLLNQRRGFLCNQAPHKHGFLEGRHAELCFLDVIPFWKLDLDQDYRVTCFTSWSPCFSCAQEMAKFISKNKHVSLCIFTARIYRRQGRCQEGLRTLAEAGAKISIMTYSEFKHCWDTFVDHQGCPFQPWDGLDEHSQDLSGRLRAILQ

SEQ ID NO: 62 - protein, 101 aa, Bacillus subtilis
EACKALGTWRLEGATLYVTLEPCPMCAGAVVLSRVEKVVFGAFDPKGGCSGTLMNLLQEERFNHQAEVVSGVLEEECGGMLSAFFRELRKKKKAARKNLSE

SEQ ID NO: 63 - protein, 161 aa, Bacillus subtilis
MTQDELYMKEAIKEAKKAEEKGEVPIGAVLVINGEIIARAHNLRETEQRSIAHAEMLVIDEACKALGTWRLEGATLYVTLEPCPMCAGAVVLSRVEKVVFGAFDPKGGCSGTLMNLLQEERFNHQAEVVSGVLEEECGGMLSAFFRELRKKKKAARKNLSE

SEQ ID NO: 64 - protein, 167 aa, E. Coli
MSEVEFSHEYWMRHALTLAKRAWDEREVPVGAVLVHNNRVIGEGWNRPIGRHDPTAHAAIMALRQGGLVMQNYRLIDATLYVTLEPCVMCAGAMIHSRIGRVVFGARDAKTGAAGSLMDVLHHPGMNHRVEITEGILADECAALLSDFFRMRRQEIKAQKKAQSSTD

SEQ ID NO: 65 - protein, 167 aa, Artificial Sequence
  Synthetic
MSEVEFSHEYWMRHALTLAKRARDEREVPVGAVLVLNNRVIGEGWNRAIGLHDPTAHAEIMALRQGGLVMQNYRLIDATLYVTFEPCVMCAGAMIHSRIGRVVFGVRNAKTGAAGSLMDVLHYPGMNHRVEITEGILADECAALLCYFFRMPRQVFNAQKKAQSSTD

SEQ ID NO: 66 - protein, 167 aa, Artificial Sequence
  Synthetic
MSEVEFSHEYWMRHALTLAKRARDEREVPVGAVLVLNNRVIGEGWNRAIGLHDPTAHAEIMALRQGGLVMQNYRLIDATLYVTFEPCVMCAGAMIHSRIGRVVFGWRNAKTGAAGSLMDVLHYPGMNHRVEITEGILADECAALLCYFFRMPRQVFNAQKKAQSSTD

SEQ ID NO: 67 - protein, 167 aa, Artificial Sequence
  Synthetic
MSEVEFSHEYWMRHALTLAKRARDEREVPVGAVLVLNNRVIGEGWNRAIGLHDPTAHAEIMALRQGGLVMQNYRLIDATLYVTFEPCVMCAGAMIHSRIGRVVFGVRWAKTGAAGSLMDVLHYPGMNHRVEITEGILADECAALLCYFFRMPRQVFNAQKKAQSSTD

SEQ ID NO: 68 - protein, 167 aa, Artificial Sequence
  Synthetic
MSEVEFSHEYWMRHALTLAKRARDEREVPVGAVLVLNNRVIGEGWNRAIGLHDPTAHAEIMALRQGGLVMQNYRLIDATLYVTFEPCVMCAGAMIHSRIGRVVFGVRQAKTGAAGSLMDVLHYPGMNHRVEITEGILADECAALLCYFFRMPRQVFNAQKKAQSSTD

SEQ ID NO: 69 - protein, 167 aa, Artificial Sequence
  Synthetic
MSEVEFSHEYWMRHALTLAKRARDEREVPVGAVLVLNNRVIGEGWNRAIGLHDPTAHAEIMALRQGGLVMQNYRLIDATLYVTFEPCVMCAGAMIHSRIGRVVFGFRNAKTGAAGSLMDVLHYPGMNHRVEITEGILADECAALLCYFFRMPRQVFNAQKKAQSSTD

SEQ ID NO: 70 - protein, 167 aa, Artificial Sequence
  Synthetic
MSEVEFSHEYWMRHALTLAKRARDEREVPVGAVLVLNNRVIGEGWNRAIGLHDPTAHAEIMALRQGGLVMQNYRLIDATLYVTFEPCVMCAGAMIHSRIGRVVFGQRNAKTGAAGSLMDVLHYPGMNHRVEITEGILADECAALLCYFFRMPRQVFNAQKKAQSSTD

SEQ ID NO: 71 - protein, 167 aa, Artificial Sequence
  Synthetic
MSEVEFSHEYWMRHALTLAKRARDEREVPVGAVLVLNNRVIGEGWNRAIGLHDPTAHAEIMALRQGGLVMQNYRLIDATLYVTFEPCVMCAGAMIHSRIGRVVFGMRNAKTGAAGSLMDVLHYPGMNHRVEITEGILADECAALLCYFFRMPRQVFNAQKKAQSSTD

SEQ ID NO: 72 - protein, 167 aa, Artificial Sequence
  Synthetic
MSEVEFSHEYWMRHALTLAKRARDEREVPVGAVLVLNNRVIGEGWNFAIGLHDPTAHAEIMALRQGGLVMQNYRLIDATLYVTFEPCVMCAGAMIHSRIGRVVFGVRNAKTGAAGSLMDVLHYPGMNHRVEITEGILADECAALLCYFFRMPRQVFNAQKKAQSSTD

SEQ ID NO: 73 - protein, 167 aa, Artificial Sequence
  Synthetic
MSEVEFSHEYWMRHALTLAKRARDEREVPVGAVLVLNNRVIGEGWNWAIGLHDPTAHAEIMALRQGGLVMQNYRLIDATLYVTFEPCVMCAGAMIHSRIGRVVFGVRNAKTGAAGSLMDVLHYPGMNHRVEITEGILADECAALLCYFFRMPRQVFNAQKKAQSSTD

SEQ ID NO: 74 - protein, 167 aa, Artificial Sequence
  Synthetic
MSEVEFSHEYWMRHALTLAKRARDEREVPVGAVLVLNNRVIGEGWNQAIGLHDPTAHAEIMALRQGGLVMQNYRLIDATLYVTFEPCVMCAGAMIHSRIGRVVFGVRNAKTGAAGSLMDVLHYPGMNHRVEITEGILADECAALLCYFFRMPRQVFNAQKKAQSSTD

SEQ ID NO: 75 - protein, 167 aa, Artificial Sequence
  Synthetic
MSEVEFSHEYWMRHALTLAKRARDEREVPVGAVLVLNNRVIGEGWNMAIGLHDPTAHAEIMALRQGGLVMQNYRLIDATLYVTFEPCVMCAGAMIHSRIGRVVFGVRNAKTGAAGSLMDVLHYPGMNHRVEITEGILADECAALLCYFFRMPRQVFNAQKKAQSSTD

SEQ ID NO: 76 - protein, 167 aa, Artificial Sequence
  Synthetic
MSEVEFSHEYWMRHALTLAKRAWDEREVPVGAVLVHNNRVIGEGWNRPIGRHDPTAHAQIMALRQGGLVMQNYRLIDATLYVTLEPCVMCAGAMIHSRIGRVVFGARDAKTGAAGSLMDVLHHPGMNHRVEITEGILADECAALLSDFFRMRRQEIKAQKKAQSSTD

SEQ ID NO: 77 - protein, 167 aa, E. Coli
MSEVEFSHEYWMRHALTLAKRAWDEREVPVGAVLVHNNRVIGEGWNRPIGRHDPTAHAEIMALRQGGLVMQNYRLIDATLYVTLEPCVMCAGAMIHSRIGRVVFGARDAKTGAAGSLMDVLHHPGMNHRVEITEGILADECAALLSDFFRMRRQEIKAQKKAQSSTD

SEQ ID NO: 78 - protein, 178 aa, E. Coli
MRRAFITGVFFLSEVEFSHEYWMRHALTLAKRAWDEREVPVGAVLVHNNRVIGEGWNRPIGRHDPTAHAEIMALRQGGLVMQNYRLIDATLYVTLEPCVMCAGAMIHSRIGRVVFGARDAKTGAAGSLMDVLHHPGMNHRVEITEGILADECAALLSDFFRMRRQEIKAQKKAQSSTD

SEQ ID NO: 79 - protein, 160 aa, Staphylococcus aureus
MGSHMTNDIYFMTLAIEEAKKAAQLGEVPIGAIITKDDEVIARAHNLRETLQQPTAHAEHIAIERAAKVLGSWRLEGCTLYVTLEPCVMCAGTIVMSRIPRVVYGADDPKGGCSGSLMNLLQQSNFNHRAIVDKGVLKEACSTLLTTFFKNLRANKKSTN

SEQ ID NO: 80 - protein, 183 aa, S. typhimurium
MPPAFITGVTSLSDVELDHEYWMRHALTLAKRAWDEREVPVGAVLVHNHRVIGEGWNRPIGRHDPTAHAEIMALRQGGLVLQNYRLLDTTLYVTLEPCVMCAGAMVHSRIGRVVFGARDAKTGAAGSLIDVLHHPGMNHRVEIIEGVLRDECATLLSDFFRMRRQEIKALKKADRAEGAGPAV

SEQ ID NO: 81 - protein, 164 aa, S. putrefaciens
MDEYWMQVAMQMAEKAEAAGEVPVGAVLVKDGQQIATGYNLSISQHDPTAHAEILCLRSAGKKLENYRLLDATLYITLEPCAMCAGAMVHSRIARVVYGARDEKTGAAGTVVNLLQHPAFNHQVEVTSGVLAEACSAQLSRFFKRRRDEKKALKLAQRAQQGIE

SEQ ID NO: 82 - protein, 173 aa, H. influenzae
MDAAKVRSEFDEKMMRYALELADKAEALGEIPVGAVLVDDARNIIGEGWNLSIVQSDPTAHAEIIALRNGAKNIQNYRLLNSTLYVTLEPCTMCAGAILHSRIKRLVFGASDYKTGAIGSRFHFFDDYKMNHTLEITSGVLAEECSQKLSTFFQKRREEKKIEKALLKSLSDK

SEQ ID NO: 83 - protein, 161 aa, Caulobacter crescentus
MRTDESEDQDHRMMRLALDAARAAAEAGETPVGAVILDPSTGEVIATAGNGPIAAHDPTAHAEIAAMRAAAAKLGNYRLTDLTLVVTLEPCAMCAGAISHARIGRVVFGADDPKGGAVVHGPKFFAQPTCHWRPEVTGGVLADESADLLRGFFRARRKAKI

SEQ ID NO: 84 - protein, 179 aa, G. sulfurreducens
MSSLKKTPIRDDAYWMGKAIREAAKAAARDEVPIGAVIVRDGAVIGRGHNLREGSNDPSAHAEMIAIRQAARRSANWRLTGATLYVTLEPCLMCMGAIILARLERVVFGCYDPKGGAAGSLYDLSADPRLNHQVRLSPGVCQEECGTMLSDFFRDLRRRKKAKATPALFIDERKVPPEP

SEQ ID NO: 85 - DNA, 189 bp, Artificial Sequence
  Synthetic
gaggccagcggttccggacgggctgacgcattggacgattttgatctggatatgctgggaagtgacgccctcgatgattttgaccttgacatgcttggttcggatgcccttgatgactttgacctcgacatgctcggcagtgacgcccttgatgatttcgacctggacatgctgattaactctagatag

SEQ ID NO: 86 - protein, 62 aa, Artificial Sequence
  Synthetic
EASGSGRADALDDFDLDMLGSDALDDFDLDMLGSDALDDFDLDMLGSDALDDFDLDMLINSR

SEQ ID NO: 87 - DNA, 1662 bp, Artificial Sequence
  Synthetic
tcgccagggatccgtcgacttgacgcgttgatatcaacaagtttgtacaaaaaagcaggctacaaagaggccagcggttccggacgggctgacgcattggacgattttgatctggatatgctgggaagtgacgccctcgatgattttgaccttgacatgcttggttcggatgcccttgatgactttgacctcgacatgctcggcagtgacgcccttgatgatttcgacctggacatgctgattaactctagaagttccggatctccgaaaaagaaacgcaaagttggtagccagtacctgcccgacaccgacgaccggcaccggatcgaggaaaagcggaagcggacctacgagacattcaagagcatcatgaagaagtcccccttcagcggccccaccgaccctagacctccacctagaagaatcgccgtgcccagcagatccagcgccagcgtgccaaaacctgccccccagccttaccccttcaccagcagcctgagcaccatcaactacgacgagttccctaccatggtgttccccagcggccagatctctcaggcctctgctctggctccagcccctcctcaggtgctgcctcaggctcctgctcctgcaccagctccagccatggtgtctgcactggctcaggcaccagcacccgtgcctgtgctggctcctggacctccacaggctgtggctccaccagcccctaaacctacacaggccggcgagggcacactgtctgaagctctgctgcagctgcagttcgacgacgaggatctgggagccctgctgggaaacagcaccgatcctgccgtgttcaccgacctggccagcgtggacaacagcgagttccagcagctgctgaaccagggcatccctgtggcccctcacaccaccgagcccatgctgatggaataccccgaggccatcacccggctcgtgacaggcgctcagaggcctcctgatccagctcctgcccctctgggagcaccaggcctgcctaatggactgctgtctggcgacgaggacttcagctctatcgccgatatggatttctcagccttgctgggctctggcagcggcagccgggattccagggaagggatgtttttgccgaagcctgaggccggctccgctattagtgacgtgtttgagggccgcgaggtgtgccagccaaaacgaatccggccatttcatcctccaggaagtccatgggccaaccgcccactccccgccagcctcgcaccaacaccaaccggtccagtacatgagccagtcgggtcactgaccccggcaccagtccctcagccactggatccagcgcccgcagtgactcccgaggccagtcacctgttggaggatcccgatgaagagacgagccaggctgtcaaagcccttcgggagatggccgatactgtgattccccagaaggaagaggctgcaatctgtggccaaatggacctttcccatccgcccccaaggggccatctggatgagctgacaaccacacttgagtccatgaccgaggatctgaacctggactcacccctgaccccggaattgaacgagattctggataccttcctgaacgacgagtgcctcttgcatgccatgcatatcagcacaggactgtccatcttcgacacatctctgttttga

SEQ ID NO: 88 - protein, 553 aa, Artificial Sequence
  Synthetic
SPGIRRLDALISTSLYKKAGYKEASGSGRADALDDFDLDMLGSDALDDFDLDMLGSDALDDFDLDMLGSDALDDFDLDMLINSRSSGSPKKKRKVGSQYLPDTDDRHRIEEKRKRTYETFKSIMKKSPFSGPTDPRPPPRRIAVPSRSSASVPKPAPQPYPFTSSLSTINYDEFPTMVFPSGQISQASALAPAPPQVLPQAPAPAPAPAMVSALAQAPAPVPVLAPGPPQAVAPPAPKPTQAGEGTLSEALLQLQFDDEDLGALLGNSTDPAVFTDLASVDNSEFQQLLNQGIPVAPHTTEPMLMEYPEAITRLVTGAQRPPDPAPAPLGAPGLPNGLLSGDEDFSSIADMDFSALLGSGSGSRDSREGMFLPKPEAGSAISDVFEGREVCQPKRIRPFHPPGSPWANRPLPASLAPTPTGPVHEPVGSLTPAPVPQPLDPAPAVTPEASHLLEDPDEETSQAVKALREMADTVIPQKEEAAICGQMDLSHPPPRGHLDELTTTLESMTEDLNLDSPLTPELNEILDTFLNDECLLHAMHISTGLSIFDTSLF

SEQ ID NO: 89 - protein, 16 aa, Artificial Sequence
  Synthetic
SGSETPGTSESATPES

SEQ ID NO: 90 - protein, 4 aa, Artificial Sequence
  Synthetic
SGGS

SEQ ID NO: 91 - protein, 124 aa, Artificial Sequence
  Synthetic
  misc_feature (5)..(124): may be absent
SGGSSGGSSGGSSGGSSGGSSGGSSGGSSGGSSGGSSGGSSGGSSGGSSGGSSGGSSGGSSGGSSGGSSGGSSGGSSGGSSGGSSGGSSGGSSGGSSGGSSGGSSGGSSGGSSGGSSGGSSGGS

SEQ ID NO: 92 - protein, 124 aa, Artificial Sequence; identical to SEQ ID NO: 91
  Synthetic
  misc_feature (5)..(124): may be absent

SEQ ID NO: 93 - protein, 124 aa, Artificial Sequence
  Synthetic
  misc_feature (5)..(124): may be absent
GGGSGGGSGGGSGGGSGGGSGGGSGGGSGGGSGGGSGGGSGGGSGGGSGGGSGGGSGGGSGGGSGGGSGGGSGGGSGGGSGGGSGGGSGGGSGGGSGGGSGGGSGGGSGGGSGGGSGGGSGGGS

SEQ ID NO: 94 - protein, 5 aa, Artificial Sequence
  Synthetic
GGGGS

SEQ ID NO: 95 - protein, 155 aa, Artificial Sequence
  Synthetic
  misc_feature (6)..(155): may be absent
GGGGSGGGGSGGGGSGGGGSGGGGSGGGGSGGGGSGGGGSGGGGSGGGGSGGGGSGGGGSGGGGSGGGGSGGGGSGGGGSGGGGSGGGGSGGGGSGGGGSGGGGSGGGGSGGGGSGGGGSGGGGSGGGGSGGGGSGGGGSGGGGSGGGGSGGGGS

SEQ ID NO: 96 - protein, 40 aa, Artificial Sequence
  Synthetic
SGGSSGGSSGGSSGSETPGTSESATPESSGGSSGGSSGGS

SEQ ID NO: 97 - protein, 31 aa, Artificial Sequence
  Synthetic
  misc_feature (2)..(31): may be absent
GGGGGGGGGGGGGGGGGGGGGGGGGGGGGGG

SEQ ID NO: 98 - protein, 264 aa, Artificial Sequence
  Synthetic
  misc_feature (5)..(124): may be absent
  misc_feature (141)..(164): may be absent
SGGSSGGSSGGSSGGSSGGSSGGSSGGSSGGSSGGSSGGSSGGSSGGSSGGSSGGSSGGSSGGSSGGSSGGSSGGSSGGSSGGSSGGSSGGSSGGSSGGSSGGSSGGSSGGSSGGSSGGSSGGSSGSETPGTSESATPESSGGSSGGSSGGSSGGSSGGSSGGSSGGSSGGSSGGSSGGSSGGSSGGSSGGSSGGSSGGSSGGSSGGSSGGSSGGSSGGSSGGSSGGSSGGSSGGSSGGSSGGSSGGSSGGSSGGSSGGSSGGS

SEQ ID NO: 99 - protein, 155 aa, Artificial Sequence
  Synthetic
  misc_feature (6)..(155): may be absent
EAAAKEAAAKEAAAKEAAAKEAAAKEAAAKEAAAKEAAAKEAAAKEAAAKEAAAKEAAAKEAAAKEAAAKEAAAKEAAAKEAAAKEAAAKEAAAKEAAAKEAAAKEAAAKEAAAKEAAAKEAAAKEAAAKEAAAKEAAAKEAAAKEAAAKEAAAK

SEQ ID NO: 100 - protein, 155 aa, Artificial Sequence; identical to SEQ ID NO: 99
  Synthetic
  misc_feature (6)..(155): may be absent

SEQ ID NO: 101 - protein, 93 aa, Artificial Sequence
  Synthetic
  misc_feature (4)..(93): may be absent
GGSGGSGGSGGSGGSGGSGGSGGSGGSGGSGGSGGSGGSGGSGGSGGSGGSGGSGGSGGSGGSGGSGGSGGSGGSGGSGGSGGSGGSGGSGGS

SEQ ID NO: 102 - protein, 93 aa, Artificial Sequence; identical to SEQ ID NO: 101
  Synthetic
  misc_feature (4)..(93): may be absent

SEQ ID NO: 103 - protein, 97 aa, Artificial Sequence
  Synthetic
  misc_feature (8)..(97): may be absent
SGGSGGSGGSGGSGGSGGSGGSGGSGGSGGSGGSGGSGGSGGSGGSGGSGGSGGSGGSGGSGGSGGSGGSGGSGGSGGSGGSGGSGGSGGSGGSGGS

SEQ ID NO: 104 - protein, 136 aa, Artificial Sequence
  Synthetic
SGGSSGGSSGGSSGGSSGGSSGGSSGGSSGGSSGGSSGGSSGGSSGGSSGGSSGGSSGGSSGSETPGTSESATPESSGGSSGGSSGGSSGGSSGGSSGGSSGGSSGGSSGGSSGGSSGGSSGGSSGGSSGGSSGGS

SEQ ID NO: 105 - protein, 96 aa, Artificial Sequence
  Synthetic
SGGSSGGSSGGSSGGSSGGSSGGSSGGSSGGSSGGSSGGSSGSETPGTSESATPESSGGSSGGSSGGSSGGSSGGSSGGSSGGSSGGSSGGSSGGS

SEQ ID NO: 106 - protein, 40 aa, Artificial Sequence
  Synthetic
SGGSSGGSSGSETPGTSESATPESSGGSSGGSSGGSSGGS

SEQ ID NO: 107 - protein, 64 aa, Artificial Sequence
  Synthetic
SGGSSGGSSGSETPGTSESATPESSGGSSGGSSGGSSGGSSGSETPGTSESATPESSGGSSGGS

SEQ ID NO: 108 - protein, 92 aa, Artificial Sequence
  Synthetic
PGSPAGSPTSTEEGTSESATPESGPGTSTEPSEGSAPGSPAGSPTSTEEGTSTEPSEGSAPGTSTEPSEGSAPGTSESATPESGPGSEPATS

SEQ ID NO: 109 - protein, 32 aa, Artificial Sequence
  Synthetic
SGGSSGGSSGSETPGTSESATPESSGGSSGGS

SEQ ID NO: 110 - protein, 104 aa, Artificial Sequence
  Synthetic
GGSGGSPGSPAGSPTSTEEGTSESATPESGPGTSTEPSEGSAPGSPAGSPTSTEEGTSTEPSEGSAPGTSTEPSEGSAPGTSESATPESGPGSEPATSGGSGGS

SEQ ID NO: 111 - protein, 24 aa, Artificial Sequence
  Synthetic
SGGSSGGSSGSETPGTSESATPES

SEQ ID NO: 112 - protein, 5 aa, Artificial Sequence
  Synthetic
GGGGS

SEQ ID NO: 113 - protein, 7 aa, Artificial Sequence
  Synthetic
PKKKRKV

SEQ ID NO: 114 - protein, 30 aa, Artificial Sequence
  Synthetic
MDSLLMNRRKFLYQFKNVRWAKGRRETYLC

SEQ ID NO: 115 - protein, 84 aa, Unknown
  Bacillus phage PBS2
MTNLSDIIEKETGKQLVIQESILMLPEEVEEVIGNKPESDILVHTAYDESTDENVMLLTSDAPEYKPWALVIQDSNGENKIKML

SEQ ID NO: 116 - protein, 219 aa, Homo sapiens
KGHLTRLGLEFFDQPAVPLARAFLGQVLVRRLPNGTELRGRIVETQAYLGPEDEAAHSRGGRQTPRNRGMFMKPGTLYVYIIYGMYFCMNISSQGDGACVLLRALEPLEGLETMRQLRSTLRKGTASRVLKDRELCSGPSKLCQALAINKSFDQRDLAQDEAVWLERGPLEPSEPAVVAAARVGVGHAGEWARKPLRFYVRGSPWVSVVDRVAEQDTQA

SEQ ID NO: 117 - protein, 222 aa, Artificial Sequence
  Synthetic
DLASLRAQQIELASSVIREDRLDKDPPDLIAGAAVGFEQGGEVTRAAMVLLKYPSLELVEYKVARIATTMPYIPGFLSFREYPALLAAWEMLSQKPDLVFVDGHGISHPRRLGVASHFGLLVDVPTIGVAKKRLCGKFEPLSSEPGALAPLMDKGEQLAWVWRSKARCNPLFIATGHRVSVDSALAWVQRCMKGYRLPEPTRWADAVASERPAFVRYTANQP

SEQ ID NO: 118 - protein, 181 aa, Erwinia tasmaniensis
MASRGVNKVILVGNLGQDPEVRYMPNGGAVANITLATSESWRDKQTGETKEKTEWHRVVLFGKLAEVAGEYLRKGSQVYIEGALQTRKWTDQAGVEKYTTEVVVNVGGTMQMLGGRSQGGGASAGGQNGGSNNGWGQPQQPQGGNQFSGGAQQQARPQQQPQQNNAPANNEPPIDFDDDIP

SEQ ID NO: 119 - protein, 209 aa, Artificial Sequence
  Synthetic
MAGAQDFVPHTADLAELAAAAGECRGCGLYRDATQAVFGAGGRSARIMMIGEQPGDKEDLAGLPFVGPAGRLLDRALEAADIDRDALYVTNAVKHFKFTRAAGGKRRIHKTPSRTEVVACRPWLIAEMTSVEPDVVVLLGATAAKALLGNDFRVTQHRGEVLHVDDVPGDPALVATVHPSSLLRGPKEERESAFAGLVDDLRVAADVRP

SEQ ID NO: 120 - protein, 313 aa, Artificial Sequence
  Synthetic
MIGQKTLYSFFSPSPARKRHAPSPEPAVQGTGVAGVPEESGDAAAIPAKKAPAGQEEPGTPPSSPLSAEQLDRIQRNKAAALLRLAARNVPVGFGESWKKHLSGEFGKPYFIKLMGFVAEERKHYTVYPPPHQVFTWTQMCDIKDVKVVILGQEPYHGPNQAHGLCFSVQRPVPPPPSLENIYKELSTDIEDFVHPGHGDLSGWAKQGVLLLNAVLTVRAHQANSHKERGWEQFTDAVVSWLNQNSNGLVFLLWGSYAQKKGSAIDRKRHHVLQTAHPSPLSVYRGFFGCRHFSKTNELLQKSGKKPIDWKEL

SEQ ID NO: 121 - protein, 173 aa, bacteriophage Mu
AKPAKRIKSAAAAYVPQNRDAVITDIKRIGDLQREASRLETEMNDAIAEITEKFAARIAPIKTDIETLSKGVQGWCEANRDELTNGGKVKTANLVTGDVSWRVRPPSVSIRGMDAVMETLERLGLQRFIRTKQEINKEAILLEPKAVAGVAGITVKSGIEDFSIIPFEQEAGI

SEQ ID NO: 122 - protein, 1710 aa, Artificial Sequence
  Synthetic
MSSETGPVAVDPTLRRRIEPHEFEVFFDPRELRKETCLLYEINWGGRHSIWRHTSQNTNKHVEVNFIEKFTTERYFCPNTRCSITWFLSWSPCGECSRAITEFLSRYPHVTLFIYIARLYHHADPRNRQGLRDLISSGVTIQIMTEQESGYCWRNFVNYSPSNEAHWPRYPHLWVRLYVLELYCIILGLPPCLNILRRKQPQLTFFTIALQSCHYQRLPPHILWATGLKSGSETPGTSESATPESDKKYSIGLAIGTNSVGWAVITDEYKVPSKKFKVLGNTDRHSIKKNLIGALLFDSGETAEATRLKRTARRRYTRRKNRICYLQEIFSNEMAKVDDSFFHRLEESFLVEEDKKHERHPIFGNIVDEVAYHEKYPTIYHLRKKLVDSTDKADLRLIYLALAHMIKFRGHFLIEGDLNPDNSDVDKLFIQLVQTYNQLFEENPINASGVDAKAILSARLSKSRRLENLIAQLPGEKKNGLFGNLIALSLGLTPNFKSNFDLAEDTKLQLSKDTYDDDLDNLLAQIGDQYADLFLAAKNLSDAILLSDILRVNTEITKAPLSASMIKLYDEHHQDLTLLKALVRQQLPEKYKEIFFDQSKNGYAGYIDGGASQEEFYKFIKPILEKMDGTEELLVKLNREDLLRKQRTFDNGIIPHQIHLGELHAILRRQEDFYPFLKDNREKIEKILTFRIPYYVGPLARGNSRFAWMTRKSEETITPWNFEKVVDKGASAQSFIERMTNFDKNLPNEKVLPKHSLLYEYFTVYNELTKVKYVTEGMRKPAFLSGDQKKAIVDLLFKTNRKVTVKQLKEDYFKKIECFDSVEISGVEDRFNASLGTYHDLLKIIKDKDFLDNEENEDILEDIVLTLTLFEDREMIEERLKTYAHLFDDKVMKQLKRRRYTGWGRLSRKLINGIRDKQSGKTILDFLKSDGFANRNFIQLIHDDSLTFKEDIQKAQVSGQGDSLHEHIANLAGSPAIKKGILQTVKVVDELVKVMGRHKPENIVIEMARENQTTQKGQKNSRERMKRIEEGIKELGSQILKEHPVENTQLQNEKLYLYYLQNGRDMYVDQELDINRLSDYDVDHIVPQSFLKDDSIDNKVLTRSDKNRGKSDNVPSEEVVKKMKNYWRQLLNAKLITQRKFDNLTKAERGGLSELDKAGFIKRQLVETRQITKHVAQILDSRMNTKYDENDKLIREVKVITLKSKLVSDFRKDFQFYKVREINNYHHAHDAYLNAVVGTALIKKYPKLESEFVYGDYKVYDVRKMIAKSEQEIGKATAKYFFYSNIMNFFKTEITLANGEIRKRPLIETNGETGEIVWDKGRDFATVRKVLSMPQVNIVKKTEVQTGGFSKESILPKRNSDKLIARKKDWDPKKYGGFDSPTVAYSVLVVAKVEKGKSKKLKSVKELLGITIMERSSFEKNPIDFLEAKGYKEVKKDLIIKLPKYSLFELENGRKRMLASAGVLQKGNELALPSKYVNFLYLASHYEKLKGSPEDNEQKQLFVEQHKHYLDEIIEQISEFSKRVILADANLDKVLSAYNKHRDKPIREQAENIIHLFTLTNLGAPAAFKYFDTTIDRKRYTSTKEVLDATLIHQSITGLYETRIDLSQLGGDSGGSTNLSDIIEKETGKQLVIQESILMLPEEVEEVIGNKPESDILVHTAYDESTDENVMLLTSDAPEYKPWALVIQDSNGENKIKMLSGGSPKKKRKV

SEQ ID NO: 123 - protein, 1710 aa, Artificial Sequence
  Synthetic
MSSETGPVAVDPTLRRRIEPHEFEVFFDPRELRKETCLLYEINWGGRHSIWRHTSQNTNKHVEVNFIEKFTTERYFCPNTRCSITWFLSWSPCGECSRAITEFLSRYPHVTLFIYIARLYHHADPRNRQGLRDLISSGVTIQIMTEQESGYCWRNFVNYSPSNEAHWPRYPHLWVRLYVLELYCIILGLPPCLNILRRKQPQLTFFTIALQSCHYQRLPPHILWATGLKSGSETPGTSESATPESDKKYSIGLAIGTNSVGWAVITDEYKVPSKKFKVLGNTDRHSIKKNLIGALLFDSGETAEATRLKRTARRRYTRRKNRICYLQEIFSNEMAKVDDSFFHRLEESFLVGEDKKHERHPIFGNIVDEVAYHEKYPTIYHLRKKLVDSTDKADLRLIYLALAHMIKFRGHFLIEGDLNPDNSDVDKLFIQLVQTYNQLFEENPINASGVDAKAILSARLAKSRRLENLIAQLPGEKKNGLFGNLIALSLGLTPNFKSNFDLAEDTKLQLSKDTYDDDLDNLLAQIGDQYADLFLAAKNLSDAILLSDILRVNTEITKAPLSASMIKRYDEHHQDLTLLKALVRQQLPEKYKEIFFDQSKNGYAGYIDGGASQEEFYKFIKPILEKMDGTEELLVKLNREDLLRKQRTFDNGIIPHQIHLGELHAILRRQEDFYPFLKDNREKIEKILTFRIPYYVGPLARGNSRFAWMTRKSEETITPWNFEKVVDKGASAQSFIERMTNFDKNLPNEKVLPKHSLLYEYFTVYNELTKVKYVTEGMRKPAFLSGDQKKAIVDLLFKTNRKVTVKQLKEDYFKKIECFDSVEISGVEDRFNASLGTYHDLLKIIKDKDFLDNEENEDILEDIVLTLTLFEDREMIEERLKTYAHLFDDKVMKQLKRRRYTGWGRLSRKLINGIRDKQSGKTILDFLKSDGFANRNFIQLIHDDSLTFKEDIQKAQVSGQGDSLHEHIANLAGSPAIKKGILQTVKVVDELVKVMGRHKPENIVIEMARENQTTQKGQKNSRERMKRIEEGIKELGSQILKEHPVENTQLQNEKLYLYYLQNGRDMYVDQELDINRLSDYDVDHIVPQSFLKDDSIDNKVLTRSDKNRGKSDNVPSEEVVKKMKNYWRQLLNAKLITQRKFDNLTKAERGGLSELDKAGFIKRQLVETRQITKHVAQILDSRMNTKYDENDKLIREVKVITLKSKLVSDFRKDFQFYKVREINNYHHAHDAYLNAVVGTALIKKYPKLESEFVYGDYKVYDVRKMIAKSEQEIGKATAKYFFYSNIMNFFKTEITLANGEIRKRPLIETNGETGEIVWDKGRDFATVRKVLSMPQVNIVKKTEVQTGGFSKESILPKRNSDKLIARKKDWDPKKYGGFDSPTVAYSVLVVAKVEKGKSKKLKSVKELLGITIMERSSFEKNPIDFLEAKGYKEVKKDLIIKLPKYSLFELENGRKRMLASAGVLQKGNELALPSKYVNFLYLASHYEKLKGSPEDNEQKQLFVEQHKHYLDEIIEQISEFSKRVILADANLDKVLSAYNKHRDKPIREQAENIIHLFTLTNLGAPAAFKYFDTTIDRKRYTSTKEVLDATLIHQSITGLYETRIDISQLGGDSGGSTNLSDIIEKETGKQLVIQESILMLPEEVEEVIGNKPESDILVHTAYDESTDENVMLLTSDAPEYKPWALVIQDSNGENKIKMLSGGSPKKKRKV

SEQ ID NO: 124 - protein, 1709 aa, Artificial Sequence
  Synthetic
MSSETGPVAVDPTLRRRIEPHEFEVFFDPRELRKETCLLYEINWGGRHSIWRTHSQNTNKHVEVNFIEKFTTERYFCPNTRCSITWFLSWSPCGECSRAITEFLSRYPHVTLFIYIARLYHHADPRNRQGLRDLISSGVTIQIMTEQESGYCWRNFVNYSPSNEAHWPRYPHLWVRLYVLELYCIILGLPPCLNILRRKQPQLTFFTIALQSCHYQRLPPHILWATGLKSGSETPGTSESATPESDKKYSIGLAIGTNSVGWAVITDEYKVPSKKFKVLGNTDRHSIKKNLIGALLFDSGETAEATRLKRTARRRYTRRKNRICYLQEIFSNEMAKVDDSFFHRLEESFLVEEDKKHERHPIFGNIVDEVAYHEKYPTYHLRKKLVDSTDKADLRLIYLALAHMIKFRGHFLIEGDLNPDNSDVDKLFIQLVQTYNQLFEENPINASGVDAKAILSARLSKSRRLENLIAQLPGEKKNGLFGNLIALSLGLTPNFKSNFDLAEDAKLQLSKDTYDDDLDNLLAQIGDQYADLFLAAKNLSDAILLSDILRVNTEITKAPLSASMIKRYDEHHQDLTLLKALVRQQLPEKYKEIFFDQSKNGYAGYIDGGASQEEFYKFIKPILEKMDGTEELLVKLNREDLLRKQRTFDNGSIPHQIHLGELHAILRRQEDFYPFLKDNREKIEKILTFRIPYYVGPLARGNSRFAWMTRKSEETITPWNFEEVVDKGASAQSFIERMTNFDKNLPNEKVLPKHSLLYEYFTVYNELTKVKYVTEGMRKPAFLSGEQKKAIVDLLFKTNRKVTVKQLKEDYFKKIECFDSVEISGVEDRFNASLGTYHDLLKIIKDKDFLDNEENEDILEDIVLTLTLFEDREMIEERLKTYAHLFDDKVMKQLKRRRYTGWGRLSRKLINGIRDKQSGKTILDFLKSDGFANRNFMQLIHDDSLTFKEDIQKAQVSGQGDSLHEHIANLAGSPAIKKGILQTVKVVDELVKVMGRHKPENIVIEMARENQTTQKGQKNSRERMKRIEEGIKELGSQILKEHPVENTQLQNEKLYLYYLQNGRDMYVDQELDINRLSDYDVDHIVPQSFLKDDSIDNKVLTRSDKNRGKSDNVPSEEVVKKMKNYWRQLLNAKLITQRKFDNLTKAERGGLSELDKAGFIKRQLVETRQITKHVAQILDSRMNTKYDENDKLIREVKVITLKSKLVSDFRKDFQFYKVREINNYHHAHDAYLNAVVGTALIKKYPKLESEFVYGDYKVYDVRKMIAKSEQEIGKATAKYFFYSNIMNFFKTEITLANGEIRKRPLIETNGETGEIVWDKGRDFATVRKVLSMPQVNIVKKTEVQTGGFSKESILPKRNSDKLIARKKDWDPKKYGGFDSPTVAYSVLVVAKVEKGKSKKLKSVKELLGITIMERSSFEKNPIDFLEAKGYKEVKKDLIIKLPKYSLFELENGRKRMLASAGELQKGNELALPSKYVNFLYLASHYEKLKGSPEDNEQKQLFVEQHKHYLDEIIEQISEFSKRVILADANLDKVLSAYNKHRDKPIREQAENIIHLFTLTNLGAPAAFKYFDTTIDRKRYTSTKEVLDATLIHQSITGLYETRIDLSQLGGDSGGSTNLSDIIEKETGKQLVIQESILMLPEEVEEVIGNKPESDILVHTAYDESTDENVMLLTSDAPEYKPWALVIQDSNGENKIKMLSGGSPKKKRKV

SEQ ID NO: 125 - protein, 1824 aa, Artificial Sequence
  Synthetic
MSSETGPVAVDPTLRRRIEPHEFEVFFDPRELRKETCLLYEINWGGRHSIWRHTSQNTNKHVEVNFIEKFTTERYFCPNTRCSITWFLSWSPCGECSRAITEFLSRYPHVTLFIYIARLYHHADPRNRQGLRDLISSGVTIQIMTEQESGYCWRNFVNYSPSNEAHWPRYPHLWVRLYVLELYCIILGLPPCLNILRRKQPQLTFFTIALQSCHYQRLPPHILWATGLKSGGSSGGSSGSETPGTSESATPESSGGSSGGSDKKYSIGLAIGTNSVGWAVITDEYKVPSKKFKVLGNTDRHSIKKNLIGALLFDSGETAEATRLKRTARRRYTRRKNRICYLQEIFSNEMAKVDDSFFHRLEESFLVEEDKKHERHPIFGNIVDEVAYHEKYPTIYHLRKKLVDSTDKADLRLIYLALAHMIKFRGHFLIEGDLNPDNSDVDKLFIQLVQTYNQLFEENPINASGVDAKAILSARLSKSRRLENLIAQLPGEKKNGLFGNLIALSLGLTPNFKSNFDLAEDTKLQLSKDTYDDDLDNLLAQIGDQYADLFLAAKNLSDAILLSDILRVNTEITKAPLSASMIKLYDEHHQDLTLLKALVRQQLPEKYKEIFFDQSKNGYAGYIDGGASQEEFYKFIKPILEKMDGTEELLVKLNREDLLRKQRTFDNGIIPHQIHLGELHAILRRQEDFYPFLKDNREKIEKILTFRIPYYVGPLARGNSRFAWMTRKSEETITPWNFEKVVDKGASAQSFIERMTNFDKNLPNEKVLPKHSLLYEYFTVYNELTKVKYVTEGMRKPAFLSGDQKKAIVDLLFKTNRKVTVKQLKEDYFKKIECFDSVEISGVEDRFNASLGTYHDLLKIIKDKDFLDNEENEDILEDIVLTLTLFEDREMIEERLKTYAHLFDDKVMKQLKRRRYTGWGRLSRKLINGIRDKQSGKTILDFLKSDGFANRNFIQLIHDDSLTFKEDIQKAQVSGQGDSLHEHIANLAGSPAIKKGILQTVKVVDELVKVMGRHKPENIVIEMARENQTTQKGQKNSRERMKRIEEGIKELGSQILKEHPVENTQLQNEKLYLYYLQNGRDMYVDQELDINRLSDYDVDHIVPQSFLKDDSIDNKVLTRSDKNRGKSDNVPSEEVVKKMKNYWRQLLNAKLITQRKFDNLTKAERGGLSELDKAGFIKRQLVETRQITKHVAQILDSRMNTKYDENDKLIREVKVITLKSKLVSDFRKDFQFYKVREINNYHHAHDAYLNAVVGTALIKKYPKLESEFVYGDYKVYDVRKMIAKSEQEIGKATAKYFFYSNIMNFFKTEITLANGEIRKRPLIETNGETGEIVWDKGRDFATVRKVLSMPQVNIVKKTEVQTGGFSKESILPKRNSDKLIARKKDWDPKKYGGFDSPTVAYSVLVVAKVEKGKSKKLKSVKELLGITIMERSSFEKNPIDFLEAKGYKEVKKDLIIKLPKYSLFELENGRKRMLASAGVLQKGNELALPSKYVNFLYLASHYEKLKGSPEDNEQKQLFVEQHKHYLDEIIEQISEFSKRVILADANLDKVLSAYNKHRDKPIREQAENIIHLFTLTNLGAPAAFKYFDTTIDRKRYTSTKEVLDATLIHQSITGLYETRIDLSQLGGDSGGSGGSGGSTNLSDIIEKETGKQLVIQESILMLPEEVEEVIGNKPESDILVHTAYDESTDENVMLLTSDAPEYKPWALVIQDSNGENKIKMLSGGSGGSGGSTNLSDIIEKETGKQLVIQESILMLPEEVEEVIGNKPESDILVHTAYDESTDENVMLLTSDAPEYKPWALVIQDSNGENKIKMLSGGSPKKKRK

SEQ ID NO: 126 - protein, 2013 aa, Artificial Sequence
  Synthetic
MAKPAKRIKSAAAAYVPQNRDAVITDIKRIGDLQREASRLETEMNDAIAEITEKFAARIAPIKTDIETLSKGVQGWCEANRDELTNGGKVKTANLVTGDVSWRVRPPSVSIRGMDAVMETLERLGLQRFIRTKQEINKEAILLEPKAVAGVAGITVKSGIEDFSIIPFEQEAGISGSETPGTSESATPESSSETGPVAVDPTLRRRIEPHEFEVFFDPRELRKETCLLYEINWGGRHSIWRHTSQNTNKHVEVNFIEKFTTERYFCPNTRCSITWFLSWSPCGECSRAITEFLSRYPHVTLFIYIARLYHHADPRNRQGLRDLISSGVTIQIMTEQESGYCWRNFVNYSPSNEAHWPRYPHLWVRLYVLELYCIILGLPPCLNILRRKQPQLTFFTIALQSCHYQRLPPHILWATGLKSGGSSGGSSGSETPGTSESATPESSGGSSGGSDKKYSIGLAIGTNSVGWAVITDEYKVPSKKFKVLGNTDRHSIKKNLIGALLFDSGETAEATRLKRTARRRYTRRKNRICYLQEIFSNEMAKVDDSFFHRLEESFLVEEDKKHERHPIFGNIVDEVAYHEKYPTIYHLRKKLVDSTDKADLRLIYLALAHMIKFRGHFLIEGDLNPDNSDVDKLFIQLVQTYNQLFEENPINASGVDAKAILSARLSKSRRLENLIAQLPGEKKNGLFGNLIALSLGLTPNFKSNFDLAEDAKLQLSKDTYDDDLDNLLAQIGDQYADLFLAAKNLSDAILLSDILRVNTEITKAPLSASMIKRYDEHHQDLTLLKALVRQQLPEKYKEIFFDQSKNGYAGYIDGGASQEEFYKFIKPILEKMDGTEELLVKLNREDLLRKQRTFDNGSIPHQIHLGELHAILRRQEDFYPFLKDNREKIEKILTFRIPYYVGPLARGNSRFAWMTRKSEETITPWNFEEVVDKGASAQSFIERMTNFDKNLPNEKVLPKHSLLYEYFTVYNELTKVKYVTEGMRKPAFLSGEQKKAIVDLLFKTNRKVTVKQLKEDYFKKIECFDSVEISGVEDRFNASLGTYHDLLKIIKDKDFLDNEENEDILEDIVLTLTLFEDREMIEERLKTYAHLFDDKVMKQLKRRRYTGWGRLSRKLINGIRDKQSGKTILDFLKSDGFANRNFMQLIHDDSLTFKEDIQKAQVSGQGDSLHEHIANLAGSPAIKKGILQTVKVVDELVKVMGRHKPENIVIEMARENQTTQKGQKNSRERMKRIEEGIKELGSQILKEHPVENTQLQNEKLYLYYLQNGRDMYVDQELDINRLSDYDVDHIVPQSFLKDDSIDNKVLTRSDKNRGKSDNVPSEEVVKKMKNYWRQLLNAKLITQRKFDNLTKAERGGLSELDKAGFIKRQLVETRQITKHVAQILDSRMNTKYDENDKLIREVKVITLKSKLVSDFRKDFQFYKVREINNYHHAHDAYLNAVVGTALIKKYPKLESEFVYGDYKVYDVRKMIAKSEQEIGKATAKYFFYSNIMNFFKTEITLANGEIRKRPLIETNGETGEIVWDKGRDFATVRKVLSMPQVNIVKKTEVQTGGFSKESILPKRNSDKLIARKKDWDPKKYGGFDSPTVAYSVLVVAKVEKGKSKKLKSVKELLGITIMERSSFEKNPIDFLEAKGYKEVKKDLIIKLPKYSLFELENGRKRMLASAGELQKGNELALPSKYVNFLYLASHYEKLKGSPEDNEQKQLFVEQHKHYLDEIIEQISEFSKRVILADANLDKVLSAYNKHRDKPIREQAENIIHLFTLTNLGAPAAFKYFDTTIDRKRYTSTKEVLDATLIHQSITGLYETRIDLSQLGGDSGGSGGSGGSTNLSDIIEKETGKQLVIQESILMLPEEVEEVIGNKPESDILVHTAYDESTDENVMLLTSDAPEYKPWALVIQDSNGENKIKMLSGGSGGSGGSTNLSDIIEKETGKQLVIQESILMLPEEVEEVIGNKPESDILVHTAYDESTDENVMLLTSDAPEYKPWALVIQDSNGENKIKMLSGGSPKKKRK

SEQ ID NO: 127 - protein, 1786 aa, Artificial Sequence
  Synthetic
MSEVEFSHEYWMRHALTLAKRAWDEREVPVGAVLVHNNRVIGEGWNRPIGRHDPTAHAEIMALRQGGLVMQNYRLIDATLYVTLEPCVMCAGAMIHSRIGRVVFGARDAKTGAAGSLMDVLHHPGMNHRVEITEGILADECAALLSDFFRMRRQEIKAQKKAQSSTDSGGSSGGSSGSETPGTSESATPESSGGSSGGSSEVEFSHEYWMRHALTLAKRARDEREVPVGAVLVLNNRVIGEGWNRAIGLHDPTAHAEIMALRQGGLVMQNYRLIDATLYVTFEPCVMCAGAMIHSRIGRVVFGVRNAKTGAAGSLMDVLHYPGMNHRVEITEGILADECAALLCYFFRMPRQVFNAQKKAQSSTDSGGSSGGSSGSETPGTSESATPESSGGSSGGSDKKYSIGLAIGTNSVGWAVITDEYKVPSKKFKVLGNTDRHSIKKNLIGALLFDSGETAEATRLKRTARRRYTRRKNRICYLQEIFSNEMAKVDDSFFHRLEESFLVEEDKKHERHPIFGNIVDEVAYHEKYPTIYHLRKKLVDSTDKADLRLIYLALAHMIKFRGHFLIEGDLNPDNSDVDKLFIQLVQTYNQLFEENPINASGVDAKAILSARLSKSRRLENLIAQLPGEKKNGLFGNLIALSLGLTPNFKSNFDLAEDTKLQLSKDTYDDDLDNLLAQIGDQYADLFLAAKNLSDAILLSDILRVNTEITKAPLSASMIKLYDEHHQDLTLLKALVRQQLPEKYKEIFFDQSKNGYAGYIDGGASQEEFYKFIKPILEKMDGTEELLVKLNREDLLRKQRTFDNGIIPHQIHLGELHAILRRQEDFYPFLKDNREKIEKILTFRIPYYVGPLARGNSRFAWMTRKSEETITPWNFEKVVDKGASAQSFIERMTNFDKNLPNEKVLPKHSLLYEYFTVYNELTKVKYVTEGMRKPAFLSGDQKKAIVDLLFKTNRKVTVKQLKEDYFKKIECFDSVEISGVEDRFNASLGTYHDLLKIIKDKDFLDNEENEDILEDIVLTLTLFEDREMIEERLKTYAHLFDDKVMKQLKRRRYTGWGRLSRKLINGIRDKQSGKTILDFLKSDGFANRNFIQLIHDDSLTFKEDIQKAQVSGQGDSLHEHIANLAGSPAIKKGILQTVKVVDELVKVMGRHKPENIVIEMARENQTTQKGQKNSRERMKRIEEGIKELGSQILKEHPVENTQLQNEKLYLYYLQNGRDMYVDQELDINRLSDYDVDHIVPQSFLKDDSIDNKVLTRSDKNRGKSDNVPSEEVVKKMKNYWRQLLNAKLITQRKFDNLTKAERGGLSELDKAGFIKRQLVETRQITKHVAQILDSRMNTKYDENDKLIREVKVITLKSKLVSDFRKDFQFYKVREINNYHHAHDAYLNAVVGTALIKKYPKLESEFVYGDYKVYDVRKMIAKSEQEIGKATAKYFFYSNIMNFFKTEITLANGEIRKRPLIETNGETGEIVWDKGRDFATVRKVLSMPQVNIVKKTEVQTGGFSKESILPKRNSDKLIARKKDWDPKKYGGFDSPTVAYSVLVVAKVEKGKSKKLKSVKELLGITIMERSSFEKNPIDFLEAKGYKEVKKDLIIKLPKYSLFELENGRKRMLASAGVLQKGNELALPSKYVNFLYLASHYEKLKGSPEDNEQKQLFVEQHKHYLDEIIEQISEFSKRVILADANLDKVLSAYNKHRDKPIREQAENIIHLFTLTNLGAPAAFKYFDTTIDRKRYTSTKEVLDATLIHQSITGLYETRIDLSQLGGDEGADKRTADGSEFESPKKKRKV

SEQ ID NO: 128 - protein, 1786 aa, Artificial Sequence
  Synthetic
MSEVEFSHEYWMRHALTLAKRAWDEREVPVGAVLVHNNRVIGEGWNRPIGRHDPTAHAEIMALRQGGLVMQNYRLIDATLYVTLEPCVMCAGAMIHSRIGRVVFGARDAKTGAAGSLMDVLHHPGMNHRVEITEGILADECAALLSDFFRMRRQEIKAQKKAQSSTDSGGSSGGSSGSETPGTSESATPESSGGSSGGSSEVEFSHEYWMRHALTLAKRARDEREVPVGAVLVLNNRVIGEGWNRAIGLHDPTAHAEIMALRQGGLVMQNYRLIDATLYVTFEPCVMCAGAMIHSRIGRVVFGVRNAKTGAAGSLMDVLHYPGMNHRVEITEGILADECAALLCYFFRMPRQVFNAQKKAQSSTDSGGSSGGSSGSETPGTSESATPESSGGSSGGSDKKYSIGLAIGTNSVGWAVITDEYKVPSKKFKVLGNTDRHSIKKNLIGALLFDSGETAEATRLKRTARRRYTRRKNRICYLQEIFSNEMAKVDDSFFHRLEESFLVGEDKKHERHPIFGNIVDEVAYHEKYPTIYHLRKKLVDSTDKADLRLIYLALAHMIKFRGHFLIEGDLNPDNSDVDKLFIQLVQTYNQLFEENPINASGVDAKAILSARLAKSRRLENLIAQLPGEKKNGLFGNLIALSLGLTPNFKSNFDLAEDTKLQLSKDTYDDDLDNLLAQIGDQYADLFLAAKNLSDAILLSDILRVNTEITKAPLSASMIKRYDEHHQDLTLLKALVRQQLPEKYKEIFFDQSKNGYAGYIDGGASQEEFYKFIKPILEKMDGTEELLVKLNREDLLRKQRTFDNGIIPHQIHLGELHAILRRQEDFYPFLKDNREKIEKILTFRIPYYVGPLARGNSRFAWMTRKSEETITPWNFEKVVDKGASAQSFIERMTNFDKNLPNEKVLPKHSLLYEYFTVYNELTKVKYVTEGMRKPAFLSGDQKKAIVDLLFKTNRKVTVKQLKEDYFKKIECFDSVEISGVEDRFNASLGTYHDLLKIIKDKDFLDNEENEDILEDIVLTLTLFEDREMIEERLKTYAHLFDDKVMKQLKRRRYTGWGRLSRKLINGIRDKQSGKTILDFLKSDGFANRNFIQLIHDDSLTFKEDIQKAQVSGQGDSLHEHIANLAGSPAIKKGILQTVKVVDELVKVMGRHKPENIVIEMARENQTTQKGQKNSRERMKRIEEGIKELGSQILKEHPVENTQLQNEKLYLYYLQNGRDMYVDQELDINRLSDYDVDHIVPQSFLKDDSIDNKVLTRSDKNRGKSDNVPSEEVVKKMKNYWRQLLNAKLITQRKFDNLTKAERGGLSELDKAGFIKRQLVETRQITKHVAQILDSRMNTKYDENDKLIREVKVITLKSKLVSDFRKDFQFYKVREINNYHHAHDAYLNAVVGTALIKKYPKLESEFVYGDYKVYDVRKMIAKSEQEIGKATAKYFFYSNIMNFFKTEITLANGEIRKRPLIETNGETGEIVWDKGRDFATVRKVLSMPQVNIVKKTEVQTGGFSKESILPKRNSDKLIARKKDWDPKKYGGFDSPTVAYSVLVVAKVEKGKSKKLKSVKELLGITIMERSSFEKNPIDFLEAKGYKEVKKDLIIKLPKYSLFELENGRKRMLASAGVLQKGNELALPSKYVNFLYLASHYEKLKGSPEDNEQKQLFVEQHKHYLDEIIEQISEFSKRVILADANLDKVLSAYNKHRDKPIREQAENIIHLFTLTNLGAPAAFKYFDTTIDRKRYTSTKEVLDATLIHQSITGIYETRIDLSQLGGDEGADKRTADGSEFESPKKKRKV

SEQ ID NO: 129 - protein, 1775 aa, Artificial Sequence
  Synthetic
MSEVEFSHEYWMRHALTLAKRAWDEREVPVGAVLVHNNRVIGEGWNRPIGRHDPTAHAEIMALRQGGLVMQNYRLIDATLYVTLEPCVMCAGAMIHSRIGRVVFGARDAKTGAAGSLMDVLHHPGMNHRVEITEGILADECAALLSDFFRMRRQEIKAQKKAQSSTDSGGSSGGSSGSETPGTSESATPESSGGSSGGSSEVEFSHEYWMRHALTLAKRARDEREVPVGAVLVLNNRVIGEGWNRAIGLHDPTAHAEIMALRQGGLVMQNYRLIDATLYVTFEPCVMCAGAMIHSRIGRVVFGVRNAKTGAAGSLMDVLHYPGMNHRVEITEGILADECAALLCYFFRMPRQVFNAQKKAQSSTDSGGSSGGSSGSETPGTSESATPESSGGSSGGSDKKYSIGLAIGTNSVGWAVITDEYKVPSKKFKVLGNTDRHSIKKNLIGALLFDSGETAEATRLKRTARRRYTRRKNRICYLQEIFSNEMAKVDDSFFHRLEESFLVEEDKKHERHPIFGNIVDEVAYHEKYPTIYHLRKKLVDSTDKADLRLIYLALAHMIKFRGHFLIEGDLNPDNSDVDKLFIQLVQTYNQLFEENPINASGVDAKAILSARLSKSRRLENLIAQLPGEKKNGLFGNLIALSLGLTPNFKSNFDLAEDAKLQLSKDTYDDDLDNLLAQIGDQYADLFLAAKNLSDAILLSDILRVNTEITKAPLSASMIKRYDEHHQDLTLLKALVRQQLPEKYKEIFFDQSKNGYAGYIDGGASQEEFYKFIKPILEKMDGTEELLVKLNREDLLRKQRTFDNGSIPHQIHLGELHAILRRQEDFYPFLKDNREKIEKILTFRIPYYVGPLARGNSRFAWMTRKSEETITPWNFEEVVDKGASAQSFIERMTNFDKNLPNEKVLPKHSLLYEYFTVYNELTKVKYVTEGMRKPAFLSGEQKKAIVDLLFKTNRKVTVKQLKEDYFKKIECFDSVEISGVEDRFNASLGTYHDLLKIIKDKDFLDNEENEDILEDIVLTLTLFEDREMIEERLKTYAHLFDDKVMKQLKRRRYTGWGRLSRKLINGIRDKQSGKTILDFLKSDGFANRNFMQLIHDDSLTFKEDIQKAQVSGQGDSLHEHIANLAGSPAIKKGILQTVKVVDELVKVMGRHKPENIVIEMARENQTTQKGQKNSRERMKRIEEGIKELGSQILKEHPVENTQLQNEKLYLYYLQNGRDMYVDQELDINRLSDYDVDHIVPQSFLKDDSIDNKVLTRSDKNRGKSDNVPSEEVVKKMKNYWRQLLNAKLITQRKFDNLTKAERGGLSELDKAGFIKRQLVETRQITKHVAQILDSRMNTKYDENDKLIREVKVITLKSKLVSDFRKDFQFYKVREINNYHHAHDAYLNAVVGTALIKKYPKLESEFVYGDYKVYDVRKMIAKSEQEIGKATAKYFFYSNIMNFFKTEITLANGEIRKRPLIETNGETGEIVWDKGRDFATVRKVLSMPQVNIVKKTEVQTGGFSKESILPKRNSDKLIARKKDWDPKKYGGFDSPTVAYSVLVVAKVEKGKSKKLKSVKELLGITIMERSSFEKNPIDFLEAKGYKEVKKDLIIKLPKYSLFELENGRKRMLASAGELQKGNELALPSKYVNFLYLASHYEKLKGSPEDNEQKQLFVEQHKHYLDEIIEQISEFSKRVILADANLDKVLSAYNKHRDKPIREQAENIIHLFTLTNLGAPAAFKYFDTTIDRKRYTSTKEVLDATLIHQSITGLYETRIDLSQLGGDSGGSPKKKRKV

SEQ ID NO: 130 - protein, 1824 aa, Artificial Sequence
  Synthetic
MSSETGPVAVDPTLRRRIEPHEFEVFFDPRELRKETCLLYEINWGGRHSIWRHTSQNTNKHVEVNFIEKFTTERYFCPNTRCSITWFLSWSPCGECSRAITEFLSRYPHVTLFIYIARLYHHADPRNRQGLRDLISSGVTIQIMTEQESGYCWRNFVNYSPSNEAHWPRYPHLWVRLYVLELYCIILGLPPCLNILRRKQPQLTFFTIALQSCHYQRLPPHILWATGLKSGGSSGGSSGSETPGTSESATPESSGGSSGGSDKKYSIGLAIGTNSVGWAVITDEYKVPSKKFKVLGNTDRHSIKKNLIGALLFDSGETAEATRLKRTARRRYTRRKNRICYLQEIFSNEMAKVDDSFFHRLEESFLVEEDKKHERHPIFGNIVDEVAYHEKYPTIYHLRKKLVDSTDKADLRLIYLALAHMIKFRGHFLIEGDLNPDNSDVDKLFIQLVQTYNQLFEENPINASGVDAKAILSARLSKSRRLENLIAQLPGEKKNGLFGNLIALSLGLTPNFKSNFDLAEDAKLQLSKDTYDDDLDNLLAQIGDQYADLFLAAKNLSDAILLSDILRVNTEITKAPLSASMIKRYDEHHQDLTLLKALVRQQLPEKYKEIFFDQSKNGYAGYIDGGASQEEFYKFIKPILEKMDGTEELLVKLNREDLLRKQRTFDNGSIPHQIHLGELHAILRRQEDFYPFLKDNREKIEKILTFRIPYYVGPLARGNSRFAWMTRKSEETITPWNFEEVVDKGASAQSFIERMTNFDKNLPNEKVLPKHSLLYEYFTVYNELTKVKYVTEGMRKPAFLSGEQKKAIVDLLFKTNRKVTVKQLKEDYFKKIECFDSVEISGVEDRFNASLGTYHDLLKIIKDKDFLDNEENEDILEDIVLTLTLFEDREMIEERLKTYAHLFDDKVMKQLKRRRYTGWGRLSRKLINGIRDKQSGKTILDFLKSDGFANRNFMQLIHDDSLTFKEDIQKAQVSGQGDSLHEHIANLAGSPAIKKGILQTVKVVDELVKVMGRHKPENIVIEMARENQTTQKGQKNSRERMKRIEEGIKELGSQILKEHPVENTQLQNEKLYLYYLQNGRDMYVDQELDINRLSDYDVDHIVPQSFLKDDSIDNKVLTRSDKNRGKSDNVPSEEVVKKMKNYWRQLLNAKLITQRKFDNLTKAERGGLSELDKAGFIKRQLVETRQITKHVAQILDSRMNTKYDENDKLIREVKVITLKSKLVSDFRKDFQFYKVREINNYHHAHDAYLNAVVGTALIKKYPKLESEFVYGDYKVYDVRKMIAKSEQEIGKATAKYFFYSNIMNFFKTEITLANGEIRKRPLIETNGETGEIVWDKGRDFATVRKVLSMPQVNIVKKTEVQTGGFSKESILPKRNSDKLIARKKDWDPKKYGGFDSPTVAYSVLVVAKVEKGKSKKLKSVKELLGITIMERSSFEKNPIDFLEAKGYKEVKKDLIIKLPKYSLFELENGRKRMLASAGELQKGNELALPSKYVNFLYLASHYEKLKGSPEDNEQKQLFVEQHKHYLDEIIEQISEFSKRVILADANLDKVLSAYNKHRDKPIREQAENIIHLFTLTNLGAPAAFKYFDTTIDRKRYTSTKEVLDATLIHQSITGLYETRIDLSQLGGDSGGSGGSGGSTNLSDIIEKETGKQLVIQESILMLPEEVEEVIGNKPESDILVHTAYDESTDENVMLLTSDAPEYKPWALVIQDSNGENKIKMLSGGSGGSGGSTNLSDIIEKETGKQLVIQESILMLPEEVEEVIGNKPESDILVHTAYDESTDENVMLLTSDAPEYKPWALVIQDSNGENKIKMLSGGSPKKKRK

SEQ ID NO: 131 - protein, 5785 aa, Artificial Sequence
  Synthetic
ATGGACAAGAAGTACTCCATTGGGCTCGATATCGGCACAAACAGCGTCGGCTGGGCCGTCATTACGGACGAGTACAAGGTGCCGAGCAAAAAATTCAAAGTTCTGGGCAATACCGATCGCCACAGCATAAAGAAGAACCTCATTGGCGCCCTCCTGTTCGACTCCGGGGAGACGGCCGAAGCCACGCGGCTCAAAAGAACAGCACGGCGCAGATATACCCGCAGAAAGAATCGGATCTGCTACCTGCAGGAGATCTTTAGTAATGAGATGGCTAAGGTGGATGACTCTTTCTTCCATAGGCTGGAGGAGTCCTTTTTGGTGGAGGAGGATAAAAAGCACGAGCGCCACCCAATCTTTGGCAATATCGTGGACGAGGTGGCGTACCATGAAAAGTACCCAACCATATATCATCTGAGGAAGAAGCTTGTAGACAGTACTGATAAGGCTGACTTGCGGTTGATCTATCTCGCGCTGGCGCATATGATCAAATTTCGGGGACACTTCCTCATCGAGGGGGACCTGAACCCAGACAACAGCGATGTCGACAAACTCTTTATCCAACTGGTTCAGACTTACAATCAGCTTTTCGAAGAGAACCCGATCAACGCATCCGGAGTTGACGCCAAAGCAATCCTGAGCGCTAGGCTGTCCAAATCCCGGCGGCTCGAAAACCTCATCGCACAGCTCCCTGGGGAGAAGAAGAACGGCCTGTTTGGTAATCTTATCGCCCTGTCCCTCGGGCTGACCCCCAACTTTAAATCTAACTTCGACCTGGCCGAAGATACCAAGCTTCAACTGAGCAAAGACACCTACGATGATGATCTCGACAATCTGCTGGCCCAGATCGGCGACCAGTACGCAGACCTTTTTTTGGCGGCAAAGAACCTGTCAGACGCCATTCTGCTGAGTGATATTCTGCGAGTGAACACGGAGATCACCAAAGCTCCGCTGAGCGCTAGTATGATCAAGCTCTATGATGAGCACCACCAAGACTTGACTTTGCTGAAGGCCCTTGTCAGACAGCAACTGCCTGAGAAGTACAAGGAAATTTTCTTCGATCAGTCTAAAAATGGCTACGCCGGATACATTGACGGCGGAGCAAGCCAGGAGGAATTTTACAAATTTATTAAGCCCATCTTGGAAAAAATGGACGGCACCGAGGAGCTGCTGGTAAAGCTTAACAGAGAAGATCTGTTGCGCAAACAGCGCACTTTCGACAATGGAATCATCCCCCACCAGATTCACCTGGGCGAACTGCACGCTATCCTCAGGCGGCAAGAGGATTTCTACCCCTTTTTGAAAGATAACAGGGAAAAGATTGAGAAAATCCTCACATTTCGGATACCCTACTATGTAGGCCCCCTCGCCCGGGGAAATTCCAGATTCGCGTGGATGACTCGCAAATCAGAAGAGACCATCACTCCCTGGAACTTCGAGAAAGTCGTGGATAAGGGGGCCTCTGCCCAGTCCTTCATCGAAAGGATGACTAACTTTGATAAAAATCTGCCTAACGAAAAGGTGCTTCCTAAACACTCTCTGCTGTACGAGTACTTCACAGTTTATAACGAGCTCACCAAGGTCAAATACGTCACAGAAGGGATGAGAAAGCCAGCATTCCTGTCTGGAGATCAGAAGAAAGCTATTGTGGACCTCCTCTTCAAGACGAACCGGAAAGTTACCGTGAAACAGCTCAAAGAAGACTATTTCAAAAAGATTGAATGTTTCGACTCTGTTGAAATCAGCGGAGTGGAGGATCGCTTCAACGCATCCCTGGGAACGTATCACGATCTCCTGAAAATCATTAAAGACAAGGACTTCCTGGACAATGAGGAGAACGAGGACATTCTTGAGGACATTGTCCTCACCCTTACGTTGTTTGAAGATAGGGAGATGATTGAAGAACGCTTGAAAACTTACGCTCATCTCTTCGACGACAAAGTCATGAAGCAGCTCAAGAGGCGCCGATATACAGGATGGGGGCGGCTGTCAAGAAAACTGATCAATGGGATCCGAGACAAGCAGAGTGGAAAGACAATCCTGGATTTTCTTAAGTCCGATGGATTTGCCAACCGGAACTTCATTCAGTTGATCCATGATGACTCTCTCACCTTTAAGGAGGACATCCAGAAAGCACAAGTTTCTGGCCAGGGGGACAGTCTTCACGAGCACATCGCTAATCTTGCAGGTAGCCCAGCTATCAAAAAGGGAATACTGCAGACCGTTAAGGTCGTGGATGAACTCGTCAAAGTAATGGGAAGGCATAAGCCCGAGAATATCGTTATCGAGATGGCCCGAGAGAACCAAACCACCCAGAAGGGACAGAAGAACAGTAGGGAAAGGATGAAGAGGATTGAAGAGGGTATAAAAGAACTGGGGTCCCAAATCCTTAAGGAACACCCAGTTGAAAACACCCAGCTTCAGAATGAGAAGCTCTACCTGTACTACCTGCAGAACGGCAGGGACATGTACGTGGATCAGGAACTGGACATCAATCGGCTCTCCGACTACGACGTGGATCATATCGTGCCCCAGTCTTTTCTCAAAGATGATTCTATTGATAATAAAGTGTTGACAAGATCCGATAAAAATAGAGGGAAGAGTGATAACGTCCCCTCAGAAGAAGTTGTCAAGAAAATGAAAAATTATTGGCGGCAGCTGCTGAACGCCAAACTGATCACACAACGGAAGTTCGATAATCTGACTAAGGCTGAACGAGGTGGCCTGTCTGAGTTGGATAAAGCCGGTTTCATCAAAAGGCAGCTTGTTGAGACACGCCAGATCACCAAGCACGTGGCCCAAATTCTCGATTCACGCATGAACACCAAGTACGATGAAAATGACAAACTGATTCGAGAGGTGAAAGTTATTACTCTGAAGTCTAAGCTGGTCTCAGATTTCAGAAAGGACTTTCAGTTTTATAAGGTGAGAGAGATCAACAATTACCACCATGCGCATGATGCCTACCTGAATGCAGTGGTAGGCACTGCACTTATCAAAAAATATCCCAAGCTTGAATCTGAATTTGTTTACGGAGACTATAAAGTGTACGATGTTAGGAAAATGATCGCAAAGTCTGAGCAGGAAATAGGCAAGGCCACCGCTAAGTACTTCTTTTACAGCAATATTATGAATTTTTTCAAGACCGAGATTACACTGGCCAATGGAGAGATTCGGAAGCGACCACTTATCGAAACAAACGGAGAAACAGGAGAAATCGTGTGGGACAAGGGTAGGGATTTCGCGACAGTCCGGAAGGTCCTGTCCATGCCGCAGGTGAACATCGTTAAAAAGACCGAAGTACAGACCGGAGGCTTCTCCAAGGAAAGTATCCTCCCGAAAAGGAACAGCGACAAGCTGATCGCACGCAAAAAAGATTGGGACCCCAAGAAATACGGCGGATTCGATTCTCCTACAGTCGCTTACAGTGTACTGGTTGTGGCCAAAGTGGAGAAAGGGAAGTCTAAAAAACTCAAAAGCGTCAAGGAACTGCTGGGCATCACAATCATGGAGCGATCAAGCTTCGAAAAAAACCCCATCGACTTTCTCGAGGCGAAAGGATATAAAGAGGTCAAAAAAGACCTCATCATTAAGCTTCCCAAGTACTCTCTCTTTGAGCTTGAAAACGGCCGGAAACGAATGCTCGCTAGTGCGGGCGTGCTGCAGAAAGGTAACGAGCTGGCACTGCCCTCTAAATACGTTAATTTCTTGTATCTGGCCAGCCACTATGAAAAGCTCAAAGGGTCTCCCGAAGATAATGAGCAGAAGCAGCTGTTCGTGGAACAACACAAACACTACCTTGATGAGATCATCGAGCAAATAAGCGAATTCTCCAAAAGAGTGATCCTCGCCGACGCTAACCTCGATAAGGTGCTTTCTGCTTACAATAAGCACAGGGATAAGCCCATCAGGGAGCAGGCAGAAAACATTATCCACTTGTTTACTCTGACCAACTTGGGCGCGCCTGCAGCCTTCAAGTACTTCGACACCACCATAGACAGAAAGCGGTACACCTCTACAAAGGAGGTCCTGGACGCCACACTGATTCATCAGTCAATTACGGGGCTCTATGAAACAAGAATCGACCTCTCTCAGCTCGGTGGAGACCCCCAAGAAGAAGAGGAAGGTGTCGCCAGGGATCCGTCGACTTGACGCGTTGATATCAACAAGTTTGTACAAAAAAGCAGGCTACAAAGAGGCCAGCGGTTCCGGACGGGCTGACGCATTGGACGATTTTGATCTGGATATGCTGGGAAGTGACGCCCTCGATGATTTTGACCTTGACATGCTTGGTTCGGATGCCCTTGATGACTTTGACCTCGACATGCTCGGCAGTGACGCCCTTGATGATTTCGACCTGGACATGCTGATTAACTCTAGAAGTTCCGGATCTCCGAAAAAGAAACGCAAAGTTGGTAGCCAGTACCTGCCCGACACCGACGACCGGCACCGGATCGAGGAAAAGCGGAAGCGGACCTACGAGACATTCAAGAGCATCATGAAGAAGTCCCCCTTCAGCGGCCCCACCGACCCTAGACCTCCACCTAGAAGAATCGCCGTGCCCAGCAGATCCAGCGCCAGCGTGCCAAAACCTGCCCCCCAGCCTTACCCCTTCACCAGCAGCCTGAGCACCATCAACTACGACGAGTTCCCTACCATGGTGTTCCCCAGCGGCCAGATCTCTCAGGCCTCTGCTCTGGCTCCAGCCCCTCCTCAGGTGCTGCCTCAGGCTCCTGCTCCTGCACCAGCTCCAGCCATGGTGTCTGCACTGGCTCAGGCACCAGCACCCGTGCCTGTGCTGGCTCCTGGACCTCCACAGGCTGTGGCTCCACCAGCCCCTAAACCTACACAGGCCGGCGAGGGCACACTGTCTGAAGCTCTGCTGCAGCTGCAGTTCGACGACGAGGATCTGGGAGCCCTGCTGGGAAACAGCACCGATCCTGCCGTGTTCACCGACCTGGCCAGCGTGGACAACAGCGAGTTCCAGCAGCTGCTGAACCAGGGCATCCCTGTGGCCCCTCACACCACCGAGCCCATGCTGATGGAATACCCCGAGGCCATCACCCGGCTCGTGACAGGCGCTCAGAGGCCTCCTGATCCAGCTCCTGCCCCTCTGGGAGCACCAGGCCTGCCTAATGGACTGCTGTCTGGCGACGAGGACTTCAGCTCTATCGCCGATATGGATTTCTCAGCCTTGCTGGGCTCTGGCAGCGGCAGCCGGGATTCCAGGGAAGGGATGTTTTTGCCGAAGCCTGAGGCCGGCTCCGCTATTAGTGACGTGTTTGAGGGCCGCGAGGTGTGCCAGCCAAAACGAATCCGGCCATTTCATCCTCCAGGAAGTCCATGGGCCAACCGCCCACTCCCCGCCAGCCTCGCACCAACACCAACCGGTCCAGTACATGAGCCAGTCGGGTCACTGACCCCGGCACCAGTCCCTCAGCCACTGGATCCAGCGCCCGCAGTGACTCCCGAGGCCAGTCACCTGTTGGAGGATCCCGATGAAGAGACGAGCCAGGCTGTCAAAGCCCTTCGGGAGATGGCCGATACTGTGATTCCCCAGAAGGAAGAGGCTGCAATCTGTGGCCAAATGGACCTTTCCCATCCGCCCCCAAGGGGCCATCTGGATGAGCTGACAACCACACTTGAGTCCATGACCGAGGATCTGAACCTGGACTCACCCCTGACCCCGGAATTGAACGAGATTCTGGATACCTTCCTGAACGACGAGTGCCTCTTGCATGCCATGCATATCAGCACAGGACTGTCCATCTTCGACACATCTCTGTTT

SEQ ID NO: 132 - protein, 1786 aa, Artificial Sequence; identical to SEQ ID NO: 128
  Synthetic

SEQ ID NO: 133 - protein, 1824 aa, Artificial Sequence
  Synthetic
MSSETGPVAVDPTLRRRIEPHEFEVFFDPRELRKETCLLYEINWGGRHSIWRHTSQNTNKHVEVNFIEKFTTERYFCPNTRCSITWFLSWSPCGECSRAITEFLSRYPHVTLFIYIARLYHHADPRNRQGLRDLISSGVTIQIMTEQESGYCWRNFVNYSPSNEAHWPRYPHLWVRLYVLELYCIILGLPPCLNILRRKQPQLTFFTIALQSCHYQRLPPHILWATGLKSGGSSGGSSGSETPGTSESATPESSGGSSGGSDKKYSIGLAIGTNSVGWAVITDEYKVPSKKFKVLGNTDRHSIKKNLIGALLFDSGETAEATRLKRTARRRYTRRKNRICYLQEIFSNEMAKVDDSFFHRLEESFLVGEDKKHERHPIFGNIVDEVAYHEKYPTIYHLRKKLVDSTDKADLRLIYLALAHMIKFRGHFLIEGDLNPDNSDVDKLFIQLVQTYNQLFEENPINASGVDAKAILSARLAKSRRLENLIAQLPGEKKNGLFGNLIALSLGLTPNFKSNFDLAEDTKLQLSKDTYDDDLDNLLAQIGDQYADLFLAAKNLSDAILLSDILRVNTEITKAPLSASMIKRYDEHHQDLTLLKALVRQQLPEKYKEIFFDQSKNGYAGYIDGGASQEEFYKFIKPILEKMDGTEELLVKLNREDLLRKQRTFDNGIIPHQIHLGELHAILRRQEDFYPFLKDNREKIEKILTFRIPYYVGPLARGNSRFAWMTRKSEETITPWNFEKVVDKGASAQSFIERMTNFDKNLPNEKVLPKHSLLYEYFTVYNELTKVKYVTEGMRKPAFLSGDQKKAIVDLLFKTNRKVTVKQLKEDYFKKIECFDSVEISGVEDRFNASLGTYHDLLKIIKDKDFLDNEENEDILEDIVLTLTLFEDREMIEERLKTYAHLFDDKVMKQLKRRRYTGWGRLSRKLINGIRDKQSGKTILDFLKSDGFANRNFIQLIHDDSLTFKEDIQKAQVSGQGDSLHEHIANLAGSPAIKKGILQTVKVVDELVKVMGRHKPENIVIEMARENQTTQKGQKNSRERMKRIEEGIKELGSQILKEHPVENTQLQNEKLYLYYLQNGRDMYVDQELDINRLSDYDVDHIVPQSFLKDDSIDNKVLTRSDKNRGKSDNVPSEEVVKKMKNYWRQLLNAKLITQRKFDNLTKAERGGLSELDKAGFIKRQLVETRQITKHVAQILDSRMNTKYDENDKLIREVKVITLKSKLVSDFRKDFQFYKVREINNYHHAHDAYLNAVVGTALIKKYPKLESEFVYGDYKVYDVRKMIAKSEQEIGKATAKYFFYSNIMNFFKTEITLANGEIRKRPLIETNGETGEIVWDKGRDFATVRKVLSMPQVNIVKKTEVQTGGFSKESILPKRNSDKLIARKKDWDPKKYGGFDSPTVAYSVLVVAKVEKGKSKKLKSVKELLGITIMERSSFEKNPIDFLEAKGYKEVKKDLIIKLPKYSLFELENGRKRMLASAGVLQKGNELALPSKYVNFLYLASHYEKLKGSPEDNEQKQLFVEQHKHYLDEIIEQISEFSKRVILADANLDKVLSAYNKHRDKPIREQAENIIHLFTLTNLGAPAAFKYFDTTIDRKRYTSTKEVLDATLIHQSITGLYETRIDISQLGGDSGGSGGSGGSTNLSDIIEKETGKQLVIQESILMLPEEVEEVIGNKPESDILVHTAYDESTDENVMLLTSDAPEYKPWALVIQDSNGENKIKMLSGGSGGSGGSTNLSDIIEKETGKQLVIQESILMLPEEVEEVIGNKPESDILVHTAYDESTDENVMLLTSDAPEYKPWALVIQDSNGENKIKMLSGGSPKKKRK

SEQ ID NO: 134 - protein, 23 aa, Artificial Sequence
  Synthetic
  misc_feature (21)..(21): Xaa can be any naturally occurring amino acid
MMMMMMMMNNNNNNNNNNNNXGG

SEQ ID NO: 135 - protein, 15 aa, Artificial Sequence
  Synthetic
  misc_feature (13)..(13): Xaa can be any naturally occurring amino acid
NNNNNNNNNNNNXGG

SEQ ID NO: 136 - protein, 23 aa, Artificial Sequence
  Synthetic
  misc_feature (21)..(21): Xaa can be any naturally occurring amino acid
MMMMMMMMMNNNNNNNNNNNXGG

SEQ ID NO: 137 - protein, 14 aa, Artificial Sequence
  Synthetic
  misc_feature (12)..(12): Xaa can be any naturally occurring amino acid
NNNNNNNNNNNXGG

SEQ ID NO: 138 - protein, 27 aa, Artificial Sequence
  Synthetic
  misc_feature (21)..(22): Xaa can be any naturally occurring amino acid
MMMMMMMMNNNNNNNNNNNNXXAGAAW

SEQ ID NO: 139 - protein, 19 aa, Artificial Sequence
  Synthetic
  misc_feature (13)..(14): Xaa can be any naturally occurring amino acid
NNNNNNNNNNNNXXAGAAW

SEQ ID NO: 140 - protein, 27 aa, Artificial Sequence
  Synthetic
  misc_feature (21)..(22): Xaa can be any naturally occurring amino acid
MMMMMMMMMNNNNNNNNNNNXXAGAAW

SEQ ID NO: 141 - protein, 18 aa, Artificial Sequence
  Synthetic
  misc_feature (12)..(13): Xaa can be any naturally occurring amino acid
NNNNNNNNNNNXXAGAAW

SEQ ID NO: 142 - protein, 25 aa, Artificial Sequence
  Synthetic
  misc_feature (21)..(21): Xaa can be any naturally occurring amino acid
  misc_feature (24)..(24): Xaa can be any naturally occurring amino acid
MMMMMMMMNNNNNNNNNNNNXGGXG

SEQ ID NO: 143 - protein, 17 aa, Artificial Sequence
  Synthetic
  misc_feature (13)..(13): Xaa can be any naturally occurring amino acid
  misc_feature (16)..(16): Xaa can be any naturally occurring amino acid
NNNNNNNNNNNNXGGXG

SEQ ID NO: 144 - protein, 25 aa, Artificial Sequence
  Synthetic
  misc_feature (21)..(21): Xaa can be any naturally occurring amino acid
  misc_feature (24)..(24): Xaa can be any naturally occurring amino acid
MMMMMMMMMNNNNNNNNNNNXGGXG

SEQ ID NO: 145 - protein, 16 aa, Artificial Sequence
  Synthetic
  misc_feature (12)..(12): Xaa can be any naturally occurring amino acid
  misc_feature (15)..(15): Xaa can be any naturally occurring amino acid
NNNNNNNNNNNXGGXG

SEQ ID NO: 146 - protein, 125 aa, Artificial Sequence
  Synthetic
NNNNNNNNGTTTTTGTACTCTCAAGATTTAGAAATAAATCTTGCAGAAGCTACAAAGATAAGGCTTCATGCCGAAATCAACACCCTGTCATTTTATGGCAGGGTGTTTTCGTTATTTAATTTTTT

SEQ ID NO: 147 - protein, 121 aa, Artificial Sequence
  Synthetic
NNNNNNNNNNNNNNNNNNGTTTTTGTACTCTCAGAAATGCAGAAGCTACAAAGATAAGGCTTCATGCCGAAATCAACACCCTGTCATTTTATGGCAGGGTGTTTTCGTTATTTAATTTTTT

SEQ ID NO: 148 - protein, 109 aa, Artificial Sequence
  Synthetic
NNNNNNNNNNNNNNNNNNNNGTTTTTGTACTCTCAGAAATGCAGAAGCTACAAAGATAAGGCTTCATGCCGAAATCAACACCCTGTCATTTTATGGCAGGGTGTTTTTT

SEQ ID NO: 149 - protein, 102 aa, Artificial Sequence
  Synthetic
NNNNNNNNNNNNNNNNNNNNGTTTTAGAGCTAGAAATAGCAAGTTAAAATAAGGCTAGTCCGTTATCAACTTGAAAAAGTGGCACCGAGTCGGTGCTTTTTT

SEQ ID NO: 150 - protein, 88 aa, Artificial Sequence
  Synthetic
NNNNNNNNNNNNNNNNNNNNGTTTTAGAGCTAGAAATAGCAAGTTAAAATAAGGCTAGTCCGTTATCAACTTGAAAAAGTGTTTTTTT

SEQ ID NO: 151 - protein, 76 aa, Artificial Sequence
  Synthetic
NNNNNNNNNNNNNNNNNNNNGTTTTAGAGCTAGAAATAGCAAGTTAAAATAAGGCTAGTCCGTTATCATTTTTTTT

SEQ ID NO: 152 - RNA, 81 nt, Artificial Sequence
  Synthetic
guuuuagagcuagaaauagcaaguuaaaauaaggcuaguccguuaucaacuugaaaaaguggcaccgagucggugcuuuuu

SEQ ID NO: 153 - protein, 1370 aa, Streptococcus agalactiae
  misc_feature (9)..(9): Xaa can be any naturally occurring amino acid
MNKPYSIGXDIGTNSVGWSIITDDYKVPAKKMRVLGNTDKEYIKKNLIGALLFDGGNTAADRRLKRTARRRYTRRRNRILYLQEIFAEEMSKVDDSFFHRLEDSFLVEEDKRGSKYPIFATLQEEKDYHEKFSTIYHLRKELADKKEKADLRLIYIALAHIIKFRGHFLIEDDSFDVRNTDISKQYQDFLEIFNTTFENNDLLSQNVDVEAILTDKISKSAKKDRILAQYPNQKSTGIFAEFLKLIVGNQADFKKYFNLEDKTPLQFAKDSYDEDLENLLGQIGDEFADLFSAAKKLYDSVLLSGILTVIDLSTKAPLSASMIQRYDEHREDLKQLKQFVKASLPEKYQEIFADSSKDGYAGYIEGKTNQEAFYKYLSKLLTKQEDSENFLEKIKNEDFLRKQRTFDNGSIPHQVHLTELKAIIRRQSEYYPFLKENQDRIEKILTFRIPYYIGPLAREKSDFAWMTRKTDDSIRPWNFEDLVDKEKSAEAFIHRMTNNDFYLPEEKVLPKHSLIYEKFTVYNELTKVRYKNEQGETYFFDSNIKQEIFDGVFKEHRKVSKKKLLDFLAKEYEEFRIVDVIGLDKENKAFNASLGTYHDLEKILDKDFLDNPDNESILEDIVQTLTLFEDREMIKKRLENYKDLFTESQLKKLYRRHYTGWGRLSAKLINGIRDKESQKTILDYLIDDGRSNRNFMQLINDDGLSFKSIISKAQAGSHSDNLKEVVGELAGSPAIKKGILQSLKIVDELVKVMGYEPEQIVVEMARENQTTNQGRRNSRQRYKLLDDGVKNLASDLNGNILKEYPTDNQALQNERLFLYYLQNGRDMYTGEALDIDNLSQYDIDHIIPQAFIKDDSIDNRVLVSSAKNRGKSDDVPSLEIVKDCKVFWKKLLDAKLMSQRKYDNLTKAERGGLTSDDKARFIQRQLVETRQITKHVARILDERFNNELDSKGRRIRKVKIVTLKSNLVSNFRKEFGFYKIREVNNYHHAHDAYLNAVVAKAILTKYPQLEPEFVYGDYPKYNSYKTRKSATEKLFFYSNIMNFFKTKVTLADGTVVVKDDIEVNNDTGEIVWDKKKHFATVRKVLSYPQNNIVKKTEIQTGGFSKESILAHGNSDKLIPRKTKDIYLDPKKYGGFDSPIVAYSVLVVADIKKGKAQKLKTVTELLGITIMERSRFEKNPSAFLESKGYLNIRADKLIILPKYSLFELENGRRRLLASAGELQKGNELALPTQFMKFLYLASRYNESKGKPEEIEKKQEFVNQHVSYFDDILQLINDFSKRVILADANLEKINKLYQDNKENISVDELANNIINLFTFTSLGAPAAFKFFDKIVDRKRYTSTKEVLNSTLIHQSITGLYETRIDLGKLGED

SEQ ID NO: 154 - protein, 1372 aa, Artificial Sequence
  Synthetic
GAASMDKKYSIGLAIGTNSVGWAVITDEYKVPSKKFKVLGNTDRHSIKKNLIGALLFDSGETAEATRLKRTARRRYTRRKNRICYLQEIFSNEMAKVDDSFFHRLEESFLVEEDKKHERHPIFGNIVDEVAYHEKYPTIYHLRKKLVDSTDKADLRLIYLALAHMIKFRGHFLIEGDLNPDNSDVDKLFIQLVQTYNQLFEENPINASGVDAKAILSARLSKSRRLENLIAQLPGEKKNGLFGNLIALSLGLTPNFKSNFDLAEDAKLQLSKDTYDDDLDNLLAQIGDQYADLFLAAKNLSDAILLSDILRVNTEITKAPLSASMIKRYDEHHQDLTLLKALVRQQLPEKYKEIFFDQSKNGYAGYIDGGASQEEFYKFIKPILEKMDGTEELLVKLNREDLLRKQRTFDNGSIPHQIHLGELHAILRRQEDFYPFLKDNREKIEKILTFRIPYYVGPLARGNSRFAWMTRKSEETITPWNFEEVVDKGASAQSFIERMTNFDKNLPNEKVLPKHSLLYEYFTVYNELTKVKYVTEGMRKPAFLSGEQKKAIVDLLFKTNRKVTVKQLKEDYFKKIECFDSVEISGVEDRFNASLGTYHDLLKIIKDKDFLDNEENEDILEDIVLTLTLFEDREMIEERLKTYAHLFDDKVMKQLKRRRYTGWGRLSRKLINGIRDKQSGKTILDFLKSDGFANRNFMQLIHDDSLTFKEDIQKAQVSGQGDSLHEHIANLAGSPAIKKGILQTVKVVDELVKVMGRHKPENIVIEMARENQTTQKGQKNSRERMKRIEEGIKELGSQILKEHPVENTQLQNEKLYLYYLQNGRDMYVDQELDINRLSDYDVDAIVPQSFLKDDSIDNKVLTRSDKNRGKSDNVPSEEVVKKMKNYWRQLLNAKLITQRKFDNLTKAERGGLSELDKAGFIKRQLVETRQITKHVAQILDSRMNTKYDENDKLIREVKVITLKSKLVSDFRKDFQFYKVREINNYHHAHDAYLNAVVGTALIKKYPKLESEFVYGDYKVYDVRKMIAKSEQEIGKATAKYFFYSNIMNFFKTEITLANGEIRKRPLIETNGETGEIVWDKGRDFATVRKVLSMPQVNIVKKTEVQTGGFSKESILPKRNSDKLIARKKDWDPKKYGGFDSPTVAYSVLVVAKVEKGKSKKLKSVKELLGITIMERSSFEKNPIDFLEAKGYKEVKKDLIIKLPKYSLFELENGRKRMLASAGELQKGNELALPSKYVNFLYLASHYEKLKGSPEDNEQKQLFVEQHKHYLDEIIEQISEFSKRVILADANLDKVLSAYNKHRDKPIREQAENIIHLFTLTNLGAPAAFKYFDTTIDRKRYTSTKEVLDATLIHQSITGLYETRIDLSQLGGD

SEQ ID NO: 155 - protein, 1056 aa, Staphylococcus Aureus
GSHMKRNYILGLDIGITSVGYGIIDYETRDVIDAGVRLFKEANVENNEGRRSKRGARRLKRRRRHRIQRVKKLLFDYNLLTDHSELSGINPYEARVKGLSQKLSEEEFSAALLHLAKRRGVHNVNEVEEDTGNELSTKEQISRNSKALEEKYVAELQLERLKKDGEVRGSINRFKTSDYVKEAKQLLKVQKAYHQLDQSFIDTYIDLLETRRTYYEGPGEGSPFGWKDIKEWYEMLMGHCTYFPEELRSVKYAYNADLYNALNDLNNLVITRDENEKLEYYEKFQIIENVFKQKKKPTLKQIAKEILVNEEDIKGYRVTSTGKPEFTNLKVYHDIKDITARKEIIENAELLDQIAKILTIYQSSEDIQEELTNLNSELTQEEIEQISNLKGYTGTHNLSLKAINLILDELWHTNDNQIAIFNRLKLVPKKVDLSQQKEIPTTLVDDFILSPVVKRSFIQSIKVINAIIKKYGLPNDIIIELAREKNSKDAQKMINEMQKRNRQTNERIEEIIRTTGKENAKYLIEKIKLHDMQEGKCLYSLEAIPLEDLLNNPFNYEVDHIIPRSVSFDNSFNNKVLVKQEEASKKGNRTPFQYLSSSDSKISYETFKKHILNLAKGKGRISKTKKEYLLEERDINRFSVQKDFINRNLVDTRYATRGLMNLLRSYFRVNNLDVKVKSINGGFTSFLRRKWKFKKERNKGYKHHAEDALIIANADFIFKEWKKLDKAKKVMENQMFEEKQAESMPEIETEQEYKEIFITPHQIKHIKDFKDYKYSHRVDKKPNRELINDTLYSTRKDDKGNTLIVNNLNGLYDKDNDKLKKLINKSPEKLLMYHHDPQTYQKLKLIMEQYGDEKNPLYKYYEETGNYLTKYSKKDNGPVIKKIKYYGNKLNAHLDITDDYPNSRNKVVKLSLKPYRFDVYLDNGVYKFVTVKNLDVIKKENYYEVNSKAYEEAKKLKKISNQAEFIASFYNNDLIKINGELYRVIGVNNDLLNRIEVNMIDITYREYLENMNDKRPPRIIKTIASKTQSIKKYSTDILGNLYEVKSKKHPQIIKKG

SEQ ID NO: 156 - protein, 1368 aa, Artificial Sequence; identical to SEQ ID NO: 9
  Synthetic

SEQ ID NO: 157 - protein, 1376 aa, Artificial Sequence
  Synthetic
MDKKYSIGLDIGTNSVGWAVITDEYKVPSKKFKVLGNTDRHSIKKNLIGALLFDSGETAEATRLKRTARRRYTRRKNRICYLQEIFSNEMAKVDDSFFHRLEESFLVEEDKKHERHPIFGNIVDEVAYHEKYPTIYHLRKKLVDSTDKADLRLIYLALAHMIKFRGHFLIEGDLNPDNSDVDKLFIQLVQTYNQLFEENPINASGVDAKAILSARLSKSRRLENLIAQLPGEKKNGLFGNLIALSLGLTPNFKSNFDLAEDAKLQLSKDTYDDDLDNLLAQIGDQYADLFLAAKNLSDAILLSDILRVNTEITKAPLSASMIKRYDEHHQDLTLLKALVRQQLPEKYKEIFFDQSKNGYAGYIDGGASQEEFYKFIKPILEKMDGTEELLVKLNREDLLRKQRTFDNGSIPHQIHLGELHAILRRQEDFYPFLKDNREKIEKILTFRIPYYVGPLARGNSRFAWMTRKSEETITPWNFEEVVDKGASAQSFIERMTNFDKNLPNEKVLPKHSLLYEYFTVYNELTKVKYVTEGMRKPAFLSGEQKKAIVDLLFKTNRKVTVKQLKEDYFKKIECFDSVEISGVEDRFNASLGTYHDLLKIIKDKDFLDNEENEDILEDIVLTLTLFEDREMIEERLKTYAHLFDDKVMKQLKRRRYTGWGRLSRKLINGIRDKQSGKTILDFLKSDGFANRNFMQLIHDDSLTFKEDIQKAQVSGQGDSLHEHIANLAGSPAIKKGILQTVKVVDELVKVMGRHKPENIVIEMARENQTTQKGQKNSRERMKRIEEGIKELGSQILKEHPVENTQLQNEKLYLYYLQNGRDMYVDQELDINRLSDYDVDHIVPQSFLKDDSIDNKVLTRSDKNRGKSDNVPSEEVVKKMKNYWRQLLNAKLITQRKFDNLTKAERGGLSELDKAGFIKRQLVETRQITKHVAQILDSRMNTKYDENDKLIREVKVITLKSKLVSDFRKDFQFYKVREINNYHHAHDAYLNAVVGTALIKKYPKLESEFVYGDYKVYDVRKMIAKSEQEIGKATAKYFFYSNIMNFFKTEITLANGEIRKRPLIETNGETGEIVWDKGRDFATVRKVLSMPQVNIVKKTEVQTGGFSKESILPKRNSDKLIARKKDWDPKKYGGFDSPTVAYSVLVVAKVEKGKSKKLKSVKELLGITIMERSSFEKNPIDFLEAKGYKEVKKDLIIKLPKYSLFELENGRKRMLASAGELQKGNELALPSKYVNFLYLASHYEKLKGSPEDNEQKQLFVEQHKHYLDEIIEQISEFSKRVILADANLDKVLSAYNKHRDKPIREQAENIIHLFTLTNLGAPAAFKYFDTTIDRKRYTSTKEVLDATLIHQSITGLYETRIDLSQLGGDPPKKKRKV

SEQ ID NO: 158 - protein, 1424 aa, Artificial Sequence
  Synthetic
MDYKDHDGDYKDHDIDYKDDDDKMAPKKKRKVGIHGVPAADKKYSIGLDIGTNSVGWAVITDEYKVPSKKFKVLGNTDRHSIKKNLIGALLFDSGETAEATRLKRTARRRYTRRKNRICYLQEIFSNEMAKVDDSFFHRLEESFLVEEDKKHERHPIFGNIVDEVAYHEKYPTIYHLRKKLVDSTDKADLRLIYLALAHMIKFRGHFLIEGDLNPDNSDVDKLFIQLVQTYNQLFEENPINASGVDAKAILSARLSKSRRLENLIAQLPGEKKNGLFGNLIALSLGLTPNFKSNFDLAEDAKLQLSKDTYDDDLDNLLAQIGDQYADLFLAAKNLSDAILLSDILRVNTEITKAPLSASMIKRYDEHHQDLTLLKALVRQQLPEKYKEIFFDQSKNGYAGYIDGGASQEEFYKFIKPILEKMDGTEELLVKLNREDLLRKQRTFDNGSIPHQIHLGELHAILRRQEDFYPFLKDNREKIEKILTFRIPYYVGPLARGNSRFAWMTRKSEETITPWNFEEVVDKGASAQSFIERMTNFDKNLPNEKVLPKHSLLYEYFTVYNELTKVKYVTEGMRKPAFLSGEQKKAIVDLLFKTNRKVTVKQLKEDYFKKIECFDSVEISGVEDRFNASLGTYHDLLKIIKDKDFLDNEENEDILEDIVLTLTLFEDREMIEERLKTYAHLFDDKVMKQLKRRRYTGWGRLSRKLINGIRDKQSGKTILDFLKSDGFANRNFMQLIHDDSLTFKEDIQKAQVSGQGDSLHEHIANLAGSPAIKKGILQTVKVVDELVKVMGRHKPENIVIEMARENQTTQKGQKNSRERMKRIEEGIKELGSQILKEHPVENTQLQNEKLYLYYLQNGRDMYVDQELDINRLSDYDVDHIVPQSFLKDDSIDNKVLTRSDKNRGKSDNVPSEEVVKKMKNYWRQLLNAKLITQRKFDNLTKAERGGLSELDKAGFIKRQLVETRQITKHVAQILDSRMNTKYDENDKLIREVKVITLKSKLVSDFRKDFQFYKVREINNYHHAHDAYLNAVVGTALIKKYPKLESEFVYGDYKVYDVRKMIAKSEQEIGKATAKYFFYSNIMNFFKTEITLANGEIRKRPLIETNGETGEIVWDKGRDFATVRKVLSMPQVNIVKKTEVQTGGFSKESILPKRNSDKLIARKKDWDPKKYGGFDSPTVAYSVLVVAKVEKGKSKKLKSVKELLGITIMERSSFEKNPIDFLEAKGYKEVKKDLIIKLPKYSLFELENGRKRMLASAGELQKGNELALPSKYVNFLYLASHYEKLKGSPEDNEQKQLFVEQHKHYLDEIIEQISEFSKRVILADANLDKVLSAYNKHRDKPIREQAENIIHLFTLTNLGAPAAFKYFDTTIDRKRYTSTKEVLDATLIHQSITGLYETRIDLSQLGGDKRPAATKKAGQAKKKKK

SEQ ID NO: 159 - protein, 1384 aa, Artificial Sequence
  Synthetic
MDKKYSIGLDIGTNSVGWAVITDEYKVPSKKFKVLGNTDRHSIKKNLIGALLFDSGETAEATRLKRTARRRYTRRKNRICYLQEIFSNEMAKVDDSFFHRLEESFLVEEDKKHERHPIFGNIVDEVAYHEKYPTIYHLRKKLVDSTDKADLRLIYLALAHMIKFRGHFLIEGDLNPDNSDVDKLFIQLVQTYNQLFEENPINASGVDAKAILSARLSKSRRLENLIAQLPGEKKNGLFGNLIALSLGLTPNFKSNFDLAEDAKLQLSKDTYDDDLDNLLAQIGDQYADLFLAAKNLSDAILLSDILRVNTEITKAPLSASMIKRYDEHHQDLTLLKALVRQQLPEKYKEIFFDQSKNGYAGYIDGGASQEEFYKFIKPILEKMDGTEELLVKLNREDLLRKQRTFDNGSIPHQIHLGELHAILRRQEDFYPFLKDNREKIEKILTFRIPYYVGPLARGNSRFAWMTRKSEETITPWNFEEVVDKGASAQSFIERMTNFDKNLPNEKVLPKHSLLYEYFTVYNELTKVKYVTEGMRKPAFLSGEQKKAIVDLLFKTNRKVTVKQLKEDYFKKIECFDSVEISGVEDRFNASLGTYHDLLKIIKDKDFLDNEENEDILEDIVLTLTLFEDREMIEERLKTYAHLFDDKVMKQLKRRRYTGWGRLSRKLINGIRDKQSGKTILDFLKSDGFANRNFMQLIHDDSLTFKEDIQKAQVSGQGDSLHEHIANLAGSPAIKKGILQTVKVVDELVKVMGRHKPENIVIEMARENQTTQKGQKNSRERMKRIEEGIKELGSQILKEHPVENTQLQNEKLYLYYLQNGRDMYVDQELDINRLSDYDVDHIVPQSFLKDDSIDNKVLTRSDKNRGKSDNVPSEEVVKKMKNYWRQLLNAKLITQRKFDNLTKAERGGLSELDKAGFIKRQLVETRQITKHVAQILDSRMNTKYDENDKLIREVKVITLKSKLVSDFRKDFQFYKVREINNYHHAHDAYLNAVVGTALIKKYPKLESEFVYGDYKVYDVRKMIAKSEQEIGKATAKYFFYSNIMNFFKTEITLANGEIRKRPLIETNGETGEIVWDKGRDFATVRKVLSMPQVNIVKKTEVQTGGFSKESILPKRNSDKLIARKKDWDPKKYGGFDSPTVAYSVLVVAKVEKGKSKKLKSVKELLGITIMERSSFEKNPIDFLEAKGYKEVKKDLIIKLPKYSLFELENGRKRMLASAGELQKGNELALPSKYVNFLYLASHYEKLKGSPEDNEQKQLFVEQHKHYLDEIIEQISEFSKRVILADANLDKVLSAYNKHRDKPIREQAENIIHLFTLTNLGAPAAFKYFDTTIDRKRYTSTKEVLDATLIHQSITGLYETRIDLSQLGGDGSPKKKRKVSSGGAAG

SEQ ID NO: 160 - protein, 1314 aa, Lactobacillus animalis
MLKKDYSIGLDIGTNSVGHAVVTDDYKVPTKKMKVFGDTSKKTIKKNMLGVLLFNEGQTAADTRLKRGARRRYTRRKNRLRYLQEIFAPALAKVDPNFFYRLEESSLVAEDKKYDVYPIFGKREEELLYHDTHKTIYHLRSELANNDRPADLRLVYLALAHIIKYRGNFLLEGEIDLRTTDINKVFAEFSETLNENSDENLGKLDVADIFKDNTFSKTKKSEELLKLSGAKKNQLAHQLFKMMVGNMGSFKKVLGTDEEHKLSFGKDTYEDDLNDLLAEAGDQYLDIFVAAKKVYDAAILASILDVKDTQTKTVFSQAMIERYEEHQKDLIELKRVFKKYLPEKCHDFFSEPKISGYAGYIDGKVSEEDFYKYTKKTLKGIPETEEILQKIDANNYLRKQRTFDNGAIPHQVHLKELVAIVENQGKYYPFLRENKDKFEKILNFRIPYYVGPLARGNSKFAWLTRAGEGKITPYNFDEMIDKETSAEDFIKRMTINDLYLPTEPVLPKHSLLYERYTIFNELAGVRYVTENGEAKYFDAQTKRSIFELFKLDRKVSEKMVIKHLKVVMPAIRIQALKGLDNGKFNASYGTYKDLVDMGVAPELLNDEVNSEKWEDIIKTLTIFEGRKLIKRRLENYRDFLGEDILRKLSRKKYTGWGRLSAKLLDGIYDKKTHKTILDCLMTEDYSQNFMQLINDDTYSFKETIKNAQVIEKEETLAKTVQELPGSPAIKKGILQSLEIVDEIIKVMGYKPKSIVVEMARETQKTHGTRKREDRVQQIVKNLKDANELPKKLPSNAELSDERKYLYCLQNGRDMYTGAPLDYDHLQFYDVDHIIPQSFLKDDSIENKVLTIKKENVRKTNGLPSEAVIQKMGSFWKKLLDAGAMTNKKYDNLRRNLHGGLNEKLKERFIERQLVETRQITKYVAQLLDQRLNYDGNGVELDEKIAIVTLKAQLASQFRSEFKLRKVRALNNLHHAHDAYLNAVVANLIMAKYPELEPEFVYGKYRKTKFKGLGKATAKNTLYANVLYFLKENEVYPFWDKARDLPTIKRYLYRAQVNKVRKAERQTGGFSDEMLVPKSDSGKLLPRKEGLDPVKYGGYAKAVESYAVLITADEVKKGKTKKVKTLVNIPIIDSKKYEADPTAYLASRGYTNVTNSFILPKYSLLEDPEGRRRYLASFKEFQKANELILPQHLVELLYWVNAKDGEQKLEDHKAEFKELFDKIMEFADKYVVAPKNSEKIRRLYEENQDATPMELGKNFVELLRYTADGAASDFKFFGENIPRKRYNSAGSLLNGTLIYQSKTGLYETRIDLGKL

SEQ ID NO: 161 - protein, 1400 aa, Artificial Sequence
  Synthetic
MAPKKKRKVGIHGVPAADKKYSIGLDIGTNSVGWAVITDEYKVPSKKFKVLGNTDRHSIKKNLIGALLFDSGETAEATRLKRTARRRYTRRKNRICYLQEIFSNEMAKVDDSFFHRLEESFLVEEDKKHERHPIFGNIVDEVAYHEKYPTIYHLRKKLVDSTDKADLRLIYLALAHMIKFRGHFLIEGDLNPDNSDVDKLFIQLVQTYNQLFEENPINASGVDAKAILSARLSKSRRLENLIAQLPGEKKNGLFGNLIALSLGLTPNFKSNFDLAEDAKLQLSKDTYDDDLDNLLAQIGDQYADLFLAAKNLSDAILLSDILRVNTEITKAPLSASMIKRYDEHHQDLTLLKALVRQQLPEKYKEIFFDQSKNGYAGYIDGGASQEEFYKFIKPILEKMDGTEELLVKLNREDLLRKQRTFDNGSIPHQIHLGELHAILRRQEDFYPFLKDNREKIEKILTFRIPYYVGPLARGNSRFAWMTRKSEETITPWNFEEVVDKGASAQSFIERMTNFDKNLPNEKVLPKHSLLYEYFTVYNELTKVKYVTEGMRKPAFLSGEQKKAIVDLLFKTNRKVTVKQLKEDYFKKIECFDSVEISGVEDRFNASLGTYHDLLKIIKDKDFLDNEENEDILEDIVLTLTLFEDREMIEERLKTYAHLFDDKVMKQLKRRRYTGWGRLSRKLINGIRDKQSGKTILDFLKSDGFANRNFMQLIHDDSLTFKEDIQKAQVSGQGDSLHEHIANLAGSPAIKKGILQTVKVVDELVKVMGRHKPENIVIEMARENQTTQKGQKNSRERMKRIEEGIKELGSQILKEHPVENTQLQNEKLYLYYLQNGRDMYVDQELDINRLSDYDVDHIVPQSFLKDDSIDNKVLTRSDKNRGKSDNVPSEEVVKKMKNYWRQLLNAKLITQRKFDNLTKAERGGLSELDKAGFIKRQLVETRQITKHVAQILDSRMNTKYDENDKLIREVKVITLKSKLVSDFRKDFQFYKVREINNYHHAHDAYLNAVVGTALIKKYPKLESEFVYGDYKVYDVRKMIAKSEQEIGKATAKYFFYSNIMNFFKTEITLANGEIRKRPLIETNGETGEIVWDKGRDFATVRKVLSMPQVNIVKKTEVQTGGFSKESILPKRNSDKLIARKKDWDPKKYGGFDSPTVAYSVLVVAKVEKGKSKKLKSVKELLGITIMERSSFEKNPIDFLEAKGYKEVKKDLIIKLPKYSLFELENGRKRMLASAGELQKGNELALPSKYVNFLYLASHYEKLKGSPEDNEQKQLFVEQHKHYLDEIIEQISEFSKRVILADANLDKVLSAYNKHRDKPIREQAENIIHLFTLTNLGAPAAFKYFDTTIDRKRYTSTKEVLDATLIHQSITGLYETRIDLSQLGGDKRPAATKKAGQAKKKK

SEQ ID NO: 162 - protein, 1329 aa, Catenibacterium mitsuokai
IVDYCIGLDLGTGSVGWAVVDMNHRLMKRNGKHLWGSRLFSNAETAANRRASRSIRRRYNKRRERIRLLRAILQDMVLEKDPTFFIRLEHTSFLDEEDKAKYLGTDYKDNYNLFIDEDFNDYTYYHKYPTIYHLRKALCESTEKADPRLIYLALHHIVKYRGNFLYEGQKFNMDASNIEDKLSDIFTQFTSFNNIPYEDDEKKNLEILEILKKPLSKKAKVDEVMTLIAPEKDYKSAFKELVTGIAGNKMNVTKMILCEPIKQGDSEIKLKFSDSNYDDQFSEVEKDLGEYVEFVDALHNVYSWVELQTIMGATHTDNASISEAMVSRYNKHHDDLKLLKDCIKNNVPNKYFDMFRNDSEKSKGYYNYINRPSKAPVDEFYKYVKKCIEKVDTPEAKQILNDIELENFLLKQNSRTNGSVPYQMQLDEMIKIIDNQAEYYPILKEKREQLLSILTFRIPYYFGPLNETSEHAWIKRLEGKENQRILPWNYQDIVDVDATAEGFIKRMRSYCTYFPDEEVLPKNSLIVSKYEVYNELNKIRVDDKLLEVDVKNDIYNELFMKNKTVTEKKLKNWLVNNQCCSKDAEIKGFQKENQFSTSLTPWIDFTNIFGKIDQSNFDLIENIIYDLTVFEDKKIMKRRLKKKYALPDDKVKQILKLKYKDWSRLSKKLLDGIVADNRFGSSVTVLDVLEMSRLNLMEIINDKDLGYAQMIEEATSCPEDGKFTYEEVERLAGSPALKRGIWQSLQIVEEITKVMKCRPKYIYIEFERSEEAKERTESKIKKLENVYKDLDEQTKKEYKSVLEELKGFDNTKKISSDSLFLYFTQLGKCMYSGKKLDIDSLDKYQIDHIVPQSLVKDDSFDNRVLVVPSENQRKLDDLVVPFDIRDKMYRFWKLLFDHELISPKKFYSLIKTEYTERDEERFINRQLVETRQITKNVTQIIEDHYSTTKVAAIRANLSHEFRVKNHIYKNRDINDYHHAHDAYIVALIGGFMRDRYPNMHDSKAVYSEYMKMFRKNKNDQKRWKDGFVINSMNYPYEVDGKLIWNPDLINEIKKCFYYKDCYCTTKLDQKSGQLFNLTVLSNDAHADKGVTKAVVPVNKNRSDVHKYGGFSGLQYTIVAIEGQKKKGKKTELVKKISGVPLHLKAASINEKINYIEEKEGLSDVRIIKDNIPVNQMIEMDGGEYLLTSPTEYVNARQLVLNEKQCALIADIYNAIYKQDYDNLDDILMIQLYIELTNKMKVLYPAYRGIAEKFESMNENYVVISKEEKANIIKQMLIVMHRGPQNGNIVYDDFKISDRIGRLKTKNHNLNNIVFISQSPTGIYTKKYKL

SEQ ID NO: 163 - protein, 1052 aa, Streptococcus pyogenes
LSASMIKRYDEHHQDLTLLKALVRQQLPEKYKEIFFDQSKNGYAGYIDGGASQEEFYKFIKPILEKMDGTEELLAKLNREDLLRKQRTFDNGSIPHQIHLGELHAILRRQEDFYPFLKDNREKIEKILTFRIPYYVGPLARGNSRFAWMTRKSEETITPWNFEEVVDKGASAQSFIERMTNFDKNLPNEKVLPKHSLLYEYFTVYNELTKVKYVTEGMRKPAFLSGEQKKAIVDLLFKTNRKVTVKQLKEDYFKKIECFDSVEISGVEDRFNASLGTYHDLLKIIKDKDFLDNEENEDILEDIVLTLTLFEDREMIEERLKTYAHLFDDKVMKQLKRRRYTGWGRLSRKLINGIRDKQSGKTILDFLKSDGFANRNFMQLIHDDSLTFKEDLQKAQVSGQGDSLHEHIANLAGSPAIKKGILQTVKVVDELVKVMGRHKPENIVIEMARENQTTQKGQKNSRERMKRIEEGIKELGSDILKEYPVENTQLQNEKLYLYYLQNGRDMYVDQELDINRLSDYDVDHIVPQSFLKDDSIDNKVLTRSDKNRGKSDNVPSEEVVKKMKNYWKQLLNAKLITQRKFDNLTKAERGGLSELDKAGFIKRQLVETRQITKHVAQILDSRMNTKYDENDKLIREVRVITLKSKLVSDFRKDFQFYKVREINNYHHAHDAYLNAVVGTALIKKYPKLESEFVYGDYKVYDIRKMIAKSEQEIGKATAKYFFYSNIMNFFKTEITLANGEIRKRPLIETNGETGEIVWDKGRDFATVRKVLSMPQVNIVKKTEVQTGGFSKESILPKRNSDKLIARKKDWDPKKYGGFDSPTVAYSVLVVAKVEKGKSKKLKSVKELVGITIMERSSFEKDPVDFLEAKGYKEVRKDLIIKLPKYSLFELENGRKRMLASAGELQKGNELALPSKYVNFLYLASHYEKLKGSPEDNEQKQLFVEQHKHYLDEIIEQISEFSKRVILADANLDKVLSAYNKHRDKPIREQAENIIHLFTLTNLGAPAAFKCFDTTIGRNRYKSIKEVLDATLIHQSITGLYETRIDLSQLGGD

SEQ ID NO: 164 - protein, 1335 aa, Sharpea azabuensis
MAKNKDIRYSIGLDIGTNSVGWAVMDEHYELLKKGNHHMWGSRLFDAAEPAATRRASRSIRRRYNKRRERIRLLRDLLGDMVMEVDPTFFIRLLNVSFLDEEDKQKNLGNDYKDNYNLFIEKDFNDKTYYDKYPTIYHLRKELCENKEKADPRLIYLALHHIVKYRGNFLYEGQSFTMDNSDIEERLNSAIEKFMSINEFDNRIVESDINSMIAVLSKIYQRSKKADDLLKIMNPTKEEKAAYKEFTKALVGLKFNISKMILAQEVKKGDTDIVLEFSNANYDSTIDELQSELGEYIEFIEMLHNIYSWVELQAILGATHTDNPSISAAMVERYEEHKKDLRVLKKVIREELPDKYNEVFRKDNRKLHNYLGYIKYPKDTPVEEFYKYIKGLLAKVDTDEAREILERIDLEKFMLKQNSRTNGSIPYQMQKDEMIQIIDNQSVYYPQLKENRDKLISILEFRIPYYFGPLNAHSEFAWIKKFEDKQKERILPWNYDQIVDIDATAEGFIERMKNTGTYFPDEPVMAKNSLTVSKFEVLNELNKIRINGKLIAVETKKELLSDLFMKNKTITDKKLKDWLVTHQYYDINEELKIEGYQKDLQFSTSLAPWIDFTKIFGEINASNYQLIEKIIYDISIFEDKKILKRRLKKVYQLDDLLVDKILKLNYTGWSRLSEKLLTGMTADNEFGSKATVLFVLENSNKNLMEIINDEKLGYKQIIEESNMQDIEGPFKYDEVKKLAGSPAIKRGIWQALLVVREITKFMKHEPSHIYIEFAREEQEKVRKESKIAKLQKIYENLNLQTKEDQQVYESLKKEDAKKRMETDALYLYYLQMGKSMYSGKPLDIDKLSTYQIDHILPQSLIKDDSFDNRVLVLPEENQWKLDSETVPFEIRNKMIGFWQMLHENGLMSNKKFFSLIRTDFSDKDKERFINRQLVETRQIIKNVAVIINDHYTNTNIVTVRAELSHQFRERYKIYKNRDINDFHHAHDAYIACIVGQFMHQNFEHLDAKIIYGQYKKNYKKDVKHHNNYGFILNSMNHLQSDIDTGEVMWDPAKIGKIKSCFYYKDVYVTKKLEQNSGTLFNVTVLPNDAHSEKGITAATVPLNKYRADVHKYGGFGNVQSIIVAIEGKKKKGKKLIDVRKLTSIPLHLKNAPVEEQLSYIASPEHEDLIDVRIVKEILKNQLIEIDGGLYYVTSPTEYVTARQLSLNEQSCKLISEIYAAMLKKRYEYLDEEEIFDLYLQLLQKMDTLYPAYKGIAKRFFDRAEDFKNIDVVEKCDVIKQILIIMHAGPMNGNIMYDDFKFTNRIGRFTHKNIDLNKTTFISTSVTGLFSKKYKL

SEQ ID NO: 165 - protein, 1368 aa, Streptococcus pyogenes
MDKKYSIGLDIGTNSVGWAVITDDYKVPSKKFKVLGNTDRHGIKKNLIGALLFDSGETAEATRLKRTARRRYTRRKNRICYLQEIFSNEMAKVDDSFFHRLEESFLVEEDKKHERHPIFGNIVDEVAYHEKYPTIYHLRKKLADSTDKVDLRLIYLALAHMIKFRGHFLIEGDLNPDNSDVDKLFIQLVQTYNQLFEENPINASRVDAKAILSARLSKSRRLENLIAQLPGEKKNGLFGNLIALSLGLTPNFKSNFDLAEDAKLQLSKDTYDDDLDNLLAQIGDQYADLFLAAKNLSDATLLSDILRVNSEITKAPLSASMIKRYDEHHQDLTLLKALVRQQLPEKYKEIFFDQSKNGYAGYIDGGASQEEFYKFIKPILEKMDGTEELLAKLNREDLLRKQRTFDNGSIPYQIHLGELHAILRRQEDFYPFLKDNREKIEKILTFRIPYYVGPLARGNSRFAWMTRKSEETITPWNFEEVVDKGASAQSFIERMTNFDKNLPNEKVLPKHSLLYEYFTVYNELTKVKYVTEGMRKPAFLSGEQKKAIVDLLFKTNRKVTVKQLKEDYFKKIECFDSVEISGVEDRFNASLGTYHDLLKIIKDKDFLDNEENEDILEDIVLTLTLFEDREMIEERLKTYAHLFDDKVMKQLKRRRYTGWGRLSRKLINGIRDKQSGKTILDFLKSDGFANRNFMQLIHDDSLTFKEDIQKAQVSGQGDSLHEHIANLAGSPAIKKGILQTVKVVDELVKVMGRHKPENIVIEMARENQTTQKGQKNSRERMKRIEEGIKELGSDILKEYPVENTQLQNEKLYLYYLQNGRDMYVDQELDINRLSDYDVDHIVPQSFLKDDSIDNKVLTRSDKNRGKSDNVPSEEVVKKMKNYWRQLLNAKLITQRKFDNLTKAERGGLSELDKAGFIKRQLVETRQITKHVAQILDSRMNTKYDENDKLIREVKVITLKSKLVSDFRKDFQFYKVREINNYHHAHDAYLNAVVGTALIKKYPKLESEFVYGDYKVYDVRKMIAKSEQEIGKATAKYFFYSNIMNFFKTEITLANGEIRKRPLIETNGETGEIVWDKGRDFATVRKVLSMPQVNIVKKTEVQTGGFSKESILPKRNSDKLIARKKDWDPKKYGGFDSPTVAYSVLVVAKVEKGKSKKLKSVKELLGITIMERSSFEKNPIDFLEAKGYKEVRKDLIIKLPKYSLFELENGRKRMLASAGELQKGNELALPSKYVNFLYLASHYEKLKGSPEDNEQKQLFVEQHKHYLDEIIEQISEFSKRVILADANLDKVLSAYNKHRDKPIREQAENIIHLFTLTNLGAPAAFKYFDTTIDRKRYTSTKEVLDATLIHQSITGLYETRIDLSQLGGD

SEQ ID NO: 166 - protein, 1368 aa, Streptococcus pyogenes
MDKKYSIGLDIGTNSVGWAVITDDYKVPSKKFKVLGNTDRHSIKKNLIGALLFDSGEIAEATRLKRTARRRYTRRKNRICYLQEIFSNEMAKVDDSFFHRLEESFLVEEDKKHERHPIFGNIVDEVAYHEKYPTIYHLRKKLVDSTDKADLRLIYLALAHMIKFRGHFLIEGDLNPDNSDVDKLFIQLVQTYNQLFEENPINASGVDAKAILSARLSKSRRLENLIAQLPGEKKNGLFGNLIALSLGLTPNFKSNFDLAEDAKLQLSKDTYDDDLDNLLAQIGDQYADLFLAAKNLSDAILLSDILRLNSEITKAPLSASMIKRYDEHHQDLTLLKALVRQQLPEKYKEIFFDQSKNGYAGYIDGGASQEEFYKFIKPILEKMDGTEELLAKLNREDLLRKQRTFDNGSIPHQIHLGELHAILRRQEDFYPFLKDNREKIEKILTFRIPYYVGPLARGNSRFAWMTRKSEETITPWNFEEVVDKGASAQSFIERMTNFDKNLPNEKVLPKHSLLYEYFTVYNELTKVKYVTEGMRKPAFLSGEQKKAIVDLLFKTNRKVTVKQLKEDYFKKIECFDSVEISGVEDRFNASLGTYHDLLKIIKDKDFLDNEENEDILEDIVLTLTLFEDREMIEERLKTYAHLFDDKVMKQLKRRRYTVWGRLSRKLINGIRDKQSGKTILDFLKSDGFANRNFMQLIHDDSLTFKEDIQKAQVSGQGDSLHEHIANLAGSPAIKKGILQTVKVVDELVKVMGRHKPENIVIEMARENQTTQKGQKNSRERMKRIEEGIKELGSQILKEHPVENTQLQNEKLYLYYLQNGRDMYVDQELDINRLSDYDVDHIVPQSFIKDDSIDNKVLTRSDKNRGKSDNVPSEEVVKKMKNYWRQLLNAKLITQRKFDNLTKAERGGLSELDKAGFIKRQLVETRQITKHVAQILDSRMNTKYDENDKLIREVKVITLKSKLVSDFRKDFQFYKVREINNYHHAHDAYLNAVVGTALIKKYPKLESEFVYGDYKVYDVRKMLAKSEQEIGKATAKYFFYSNIMNFFKTEITLANGEIRKRPLIETNGETGEIVWDKGRDFATVRKVLSMPQVNIVKKTEVQTGGFSKESILPKRNSDKLIARKKDWDPKKYGGFDSPTVAYSVLVVAKVEKGKSKKLKSVKELLGITIMERSSFEKNPIDFLEAKGYKEVRKDLIIKLPKYSLFELENGRKRMLASAGELQKGNELALPSKYVNFLYLASHYEKLKGSPEDNEQKQLFVEQHKHYLDEIIEQISEFSKRVILADANLDKVLSAYNKHRDKPIREQAENIIHLFTLTNLGAPTAFKYFDTTIDRKRYTSTKEVLDATFIHQSITGLYETRIDLSQLGGD

SEQ ID NO: 167 - protein, 1368 aa, Unknown
  Streptococcus - multispecies
MDKKYSIGLDIGTNSVGWAVITDDYKVPSKKFKVLGNTDRHSIKKNLIGALLFDSGEIAEATRLKRTARRRYTRRKNRICYLQEIFSNEMAKVDDSFFHRLEESFLVEEDKKHERHPIFGNIVDEVAYHEKYPTIYHLRKKLVDSTDKADLRLIYLALAHMIKFRGHFLIEGDLNPDNSDVDKLFIQLVQTYNQLFEENPINASGVDAKAILSARLSKSRRLENLIAQLPGEKKNGLFGNLIALSLGLTPNFKSNFDLAEDAKLQLSKDTYDDDLDNLLAQIGDQYADLFLAAKNLSDAILLSDILRLNSEITKAPLSASMIKRYDEHHQDLTLLKALVRQQLPEKYKEIFFDQSKNGYAGYIDGGASQEEFYKFIKPILEKMDGTEELLAKLNREDLLRKQRTFDNGSIPHQIHLGELHAILRRQEDFYPFLKDNREKIEKILTFRIPYYVGPLARGNSRFAWMTRKSEETITPWNFEEVVDKGASAQSFIERMTNFDKNLPNEKVLPKHSLLYEYFTVYNELTKVKYVTEGMRKPAFLSGEQKKAIVDLLFKTNRKVTVKQLKEDYFKKIECFDSVEISGVEDRFNASLGTYHDLLKIIKDKDFLDNEENEDILEDIVLTLTLFEDREMIEERLKTYAHLFDDKVMKQLKRRRYTGWGRLSRKLINGIRDKQSGKTILDFLKSDGFANRNFMQLIHDDSLTFKEDIQKAQVSGQGDSLHEHIANLAGSPAIKKGILQTVKVVDELVKVMGRHKPENIVIEMARENQTTQKGQKNSRERMKRIEEGIKELGSQILKEHPVENTQLQNEKLYLYYLQNGRDMYVDQELDINRLSDYDVDHIVPQSFIKDDSIDNKVLTRSDKNRGKSDNVPSEEVVKKMKNYWRQLLNAKLITQRKFDNLTKAERGGLSELDKAGFIKRQLVETRQITKHVAQILDSRMNTKYDENDKLIREVKVITLKSKLVSDFRKDFQFYKVREINNYHHAHDAYLNAVVGTALIKKYPKLESEFVYGDYKVYDVRKMLAKSEQEIGKATAKYFFYSNIMNFFKTEITLANGEIRKRPLIETNGETGEIVWDKGRDFATVRKVLSMPQVNIVKKTEVQTGGFSKESILPKRNSDKLIARKKDWDPKKYGGFDSPTVAYSVLVVAKVEKGKSKKLKSVKELLGITIMERSSFEKNPIDFLEAKGYKEVRKDLIIKLPKYSLFELENGRKRMLASAGELQKGNELALPSKYVNFLYLASHYEKLKGSPEDNEQKQLFVEQHKHYLDEIIEQISEFSKRVILADANLDKVLSAYNKHRDKPIREQAENIIHLFTLTNLGAPTAFKYFDTTIDRKRYTSTKEVLDATFIHQSITGLYETRIDLSQLGGD

SEQ ID NO: 168 - protein, 1368 aa, Streptococcus pyogenes
MDKKYSIGLDIGTNSVGWAVITDDYKVPSKKFKVLGNTDRHSIKKNLIGALLFDSGEIAEATRLKRTARRRYTRRKNRICYLQEIFSNEMAKVDDSFFHRLEESFLVEEDKKHERHPIFGNIVDEVAYHEKYPTIYHLRKKLVDSTDKADLRLIYLALAHMIKFRGHFLIEGDLNPDNSDVDKLFIQLVQTYNQLFEENPINASGVDAKAILSARLSKSRRLENLIAQLPGEKKNGLFGNLIALSLGLTPNFKSNFDLAEDAKLQLSKDTYDDDLDNLLAQIGDQYADLFLAAKNLSDAILLSDILRLNSEITKAPLSASMIKRYDEHHQDLTLLKALVRQQLPEKYKEIFFDQSKNGYAGYIDGGASQEEFYKFIKPILEKMDGTEELLAKLNRKDLLRKQRTFDNGSIPHQIHLGELHAILRRQEDFYPFLKDNREKIEKILTFRIPYYVGPLARGNSRFAWMTRKSEETITPWNFEEVVDKGASAQSFIERMTNFDKNLPNEKVLPKHSLLYEYFTVYNELTKVKYVTEGMRKPAFLSGEQKKAIVDLLFKTNRKVTVKQLKEDYFKKIECFDSVEISGVEDRFNASLGTYHDLLKIIKDKDFLDNEENEDILEDIVLTLTLFEDREMIEERLKTYAHLFDDKVMKQLKRRRYTGWGRLSRKLINGIRDKQSGKTILDFLKSDGFANRNFMQLIHDDSLTFKEDIQKAQVSGQGDSLHEHIANLAGSPAIKKGILQTVKVVDELVKVMGRHKPENIVIEMARENQTTQKGQKNSRERMKRIEEGIKELGSQILKEHPVENTQLQNEKLYLYYLQNGRDMYVDQELDINRLSDYDVDHIVPQSFIKDDSIDNKVLTRSDKNRGKSDNVPSEEVVKKMKNYWRQLLNAKLITQRKFDNLTKAERGGLSELDKAGFIKRQLVETRQITKHVAQILDSRMNTKYDENDKLIREVKVITLKSKLVSDFRKDFQFYKVREINNYHHAHDAYLNAVVGTALIKKYPKLESEFVYGDYKVYDVRKMLAKSEQEIGKATAKYFFYSNIMNFFKTEITLANGEIRKRPLIETNGETGEIVWDKGRDFATVRKVLSMPQVNIVKKTEVQTGGFSKESILPKRNSDKLIARKKDWDPKKYGGFDSPTVAYSVLVVAKVEKGKSKKLKSVKELLGITIMERSSFEKNPIDFLEAKGYKEVRKDLIIKLPKYSLFELENGRKRMLASAGELQKGNELALPSKYVNFLYLASHYEKLKGSPEDNEQKQLFVEQHKHYLDEIIEQISEFSKRVILADANLDKVLSAYNKHRDKPIREQAENIIHLFTLTNLGAPTAFKYFDTTIDRKRYTSTKEVLDATFIHQSITGLYETRIDLSQLGGD

SEQ ID NO: 169 - protein, 1368 aa, Streptococcus pyogenes
MDKKYSIGLDIGTNSVGWAVITDDYKVPSKKFKVLGNTDRHSIKKNLIGALLFDSGETAEATRLKRTARRRYTRRKNRICYLQEIFSNEIAKVDDSFFHRLEESFLVEEDKKHERHPIFGNIVDEVAYHEKYPTIYHLRKKLADSTDKADLRLIYLALAHMIKFRGHFLIEGDLNPDNSDVDKLFIQLVQTYNQLFEENPINASRVDAKAILSARLSKSRRLENLIAQLPGEKRNGLFGNLIALSLGLTPNFKSNFDLAEDAKLQLSKDTYDDDLDNLLAQIGDQYADLFLAAKNLSDAILLSDILRVNTEITKAPLSASMIKRYDEHHQDLTLLKALVRQQLPEKYKEIFFDQSKNGYAGYIDGGASQEEFYKFIKPILEKMDGTEELLAKLNREDLLRKQRTFDNGSIPHQIHLGELHAILRRQEDFYPFLKDNREKIEKILTFRIPYYVGPLARGNSRFAWMTRKSEETITPWNFEEVVDKGASAQSFIERMTNFDKNLPNEKVLPKHSLLYEYFTVYNELTKVKYVTEGMRKPAFLSGEQKKAIVDLLFKTNRKVTVKQLKEDYFKKIECFDSVEISGVEDRFNASLGTYHDLLKIIKDKDFLDNEENEDILEDIVLTLTLFEDREMIEERLKTYAHLFDDKVMKQLKRRRYTGWGRLSRKLINGIRDKQSGKTILDFLKSDGFANRNFMQLIHDDSLTFKEDLQKAQVSGQGDSLHEHIANLAGSPAIKKGILQTVKVVDELVKVMGRHKPENIVIEMARENQTTQKGQKNSRERMKRIEEGIKELGSDILKEYPVETTQLQNEKLYLYYLQNGRDMYVDQELDINRLSDYDVDHIVPQSFLKDDSIDNKVLTRSDKNRGKSDNVPSEEVVKKMKNYWKQLLNAKLITQRKFDNLTKAERGGLSELDKAGFIKRQLVETRQITKHVAQILDSRMNTKYDENDKLIREVRVITLKSKLVSDFRKDFQFYKVREINNYHHAHDAYLNAVVGTALIKKYPKLESEFVYGDYKVYDIRKMIAKSEQEIGKATAKYFFYSNIMNFFKTEITLANGEIRKRPLIETNGETGEIVWDKGRDFATVRKVLSMPQVNIVKKTEVQTGGFSKESILPKRNSDKLIARKKDWDPKKYGGFDSPTVAYSVLVVAKVEKGKSKKLKSVKELVGITIMERSSFEKDPVDFLEAKGYKEVRKDLIIKLPKYSLFELENGRKRMLASAGELQKGNELALPSKYVNFLYLASHYEKLKGSPEDNEQKQLFVEQHKHYLDEIIEQISEFSKRVILADANLDKVLSAYNKHRDKPIREQAENIIHLFTLTNLGAPAAFKCFDTTIGRNRYKSIKEVLDATLIHQSITGLYETRIDLSQLGGD

SEQ ID NO: 170 - protein, 1368 aa, Streptococcus pyogenes
MDKKYSIGLDIGTNSVGWAVITDDYKVPSKKFKVLGNTDRHSIKKNLIGALLFDSGETAEATRLKRTARRRYTRRKNRICYLQEIFSNEIAKVDDSFFHRLEESFLVEEDKKHERHPIFGNIVDEVAYHEKYPTIYHLRKKLADSTDKADLRLIYLALAHMIKFRGHFLIEGDLNPDNSDVDKLFIQLVQTYNQLFEENPINASRVDAKAILSARLSKSRRLENLIAQLPGEKRNGLFGNLIALSLGLTPNFKSNFDLAEDAKLQLSKDTYDDDLDNLLAQIGDQYADLFLAAKNLSDAILLSDILRVNTEITKAPLSASMIKRYDEHHQDLTLLKALVRQQLPEKYKEIFFDQSKNGYAGYIDGGASQEEFYKFIKPILEKMDGTEELLAKLNREDLLRKQRTFDNGSIPHQIHLGELHAILRRQEDFYPFLKDNREKIEKILTFRIPYYVGPLARGNSRFAWMTRKSEETITPWNFEEVVDKGASAQSFIERMTNFDKNLPNEKVLPKHSLLYEYFTVYNELTKVKYVTEGMRKPAFLSGEQKKAIVDLLFKTNRKVTVKQLKEDYFKKIECFDSVEISGVEDRFNASLGTYHDLLKIIKDKDFLDNEENEDILEDIVLTLTLFEDREMIEERLKTYAHLFDDKVMKQLKRRRYTGWGRLSRKLINGIRDKQSGKTILDFLKSDGFANRNFMQLIHDDSLTFKEDLQKAQVSGQGDSLHEHIANLAGSPAIKKGILQTVKVVDELVKVMGRHKPENIVIEMARENQTTQKGQKNSRERMKRIEEGIKELGSDILKEYPVENTQLQNEKLYLYYLQNGRDMYVDQELDINRLSDYDVDHIVPQSFLKDDSIDNKVLTRSDKNRGKSDNVPSEEVVKKMKNYWKQLLNAKLITQRKFDNLTKAERGGLSELDKAGFIKRQLVETRQITKHVAQILDSRMNTKYDENDKLIREVRVITLKSKLVSDFRKDFQFYKVREINNYHHAHDAYLNAVVGTALIKKYPKLESEFVYGDYKVYDIRKMIAKSEQEIGKATAKYFFYSNIMNFFKTEITLANGEIRKRPLIETNGETGEIVWDKGRDFATVRKVLSMPQVNIVKKTEVQTGGFSKESILPKRNSDKLIARKKDWDPKKYGGFDSPTVAYSVLVVAKVEKGKSKKLKSVKELVGITIMERSSFEKDPVDFLEAKGYKEVRKDLIIKLPKYSLFELENGRKRMLASAGELQKGNELALPSKYVNFLYLASHYEKLKGSPEDNEQKQLFVEQHKHYLDEIIEQISEFSKRVILADANLDKVLSAYNKHRDKPIREQAENIIHLFTLTNLGAPAAFKYFDTTIGRNRYKSIKEVLDATLIHQSITGLYETRIDLSQLGGD

SEQ ID NO: 171 - protein, 1368 aa, Streptococcus pyogenes
MDKKYSIGLDIGTNSVGWAVITDDYKVPSKKFKVLGNTDRHSIKKNLIGALLFDSGETAEATRLKRTARRRYTRRKNRICYLQEIFSNEIAKVDDSFFHRLEESFLVEEDKKHERHPIFGNIVDEVAYHEKYPTIYHLRKKLADSTDKADLRLIYLALAHMIKFRGHFLIEGGLNPDNSDVDKLFIQLVQTYNQLFEENPINASRVDAKAILSARLSKSRRLENLIAQLPGEKRNGLFGNLIALSLGLTPNFKSNFDLAEDAKLQLSKDTYDDDLDNLLAQIGDQYADLFLAAKNLSDAILLSDILRVNTEITKAPLSASMIKRYDEHHQDLTLLKALVRQQLPEKYKEIFFDQSKNGYAGYIDGGASQEEFYKFIKPILEKMDGTEELLAKLNREDLLRKQRTFDNGSIPHQIHLGELHAILRRQEDFYPFLKDNREKIEKILTFRIPYYVGPLARGNSRFAWMTRKSEETITPWNFEEVVDKGASAQSFIERMTNFDKNLPNEKVLPKHSLLYEYFTVYNELTKVKYVTEGMRKPAFLSGEQKKAIVDLLFKTNRKVTVKQLKEDYFKKIECFDSVEISGVEDRFNASLGTYHDLLKIIKDKDFLDNEENEDILEDIVLTLTLFEDREMIEERLKTYAHLFDDKVMKQLKRRRYTGWGRLSRKLINGIRDKQSGKTILDFLKSDGFANRNFMQLIHDDSLTFKEDLQKAQVSGQGDSLHEHIANLAGSPAIKKGILQTVKVVDELVKVMGRHKPENIVIEMARENQTTQKGQKNSRERMKRIEEGIKELGSDILKEYPVENTQLQNEKLYLYYLQNGRDMYVDQELDINRLSDYDVDHIVPQSFLKDDSIDNKVLTRSDKNRGKSDNVPSEEVVKKMKNYWKQLLNAKLITQRKFDNLTKAERGGLSELDKAGFIKRQLVETRQITKHVAQILDSRMNTKYDENDKLIREVRVITLKSKLVSDFRKDFQFYKVREINNYHHAHDAYLNAVVGTALIKKYPKLESEFVYGDYKVYDIRKMIAKSEQEIGKATAKYFFYSNIMNFFKTEITLANGEIRKRPLIETNGETGEIVWDKGRDFATVRKVLSMPQVNIVKKTEVQTGGFSKESILPKRNSDKLIARKKDWDPKKYGGFDSPTVAYSVLVVAKVEKGKSKKLKSVKELVGITIMERSSFEKDPVDFLEAKGYKEVRKDLIIKLPKYSLFELENGRKRMLASAGELQKGNELALPSKYVNFLYLASHYEKLKGSPEDNEQKQLFVEQHKHYLDEIIEQISEFSKRVILADANLDKVLSAYNKHRDKPIREQAENIIHLFTLTNLGAPAAFKYFDTTIGRNRYKSIKEVLDATLIHQSITGLYETRIDLSQLGGD

SEQ ID NO: 172 - protein, 1368 aa, Streptococcus pyogenes
MDKKYSIGLDIGTNSVGWAVITDDYKVPSKKFKVLGNTDRHSIKKNLIGALLFDSGETAEATRLKRTARRRYTRRKNRICYLQEIFSNEMAKVDDSFFHRLEESFLVEEDKKHERHPIFGNIVDEVAYHEKYPTIYHLRKKLADSTDKADLRLIYLALAHMIKFRGHFLIEGDLNPDNSDVDKLFIQLVQTYNQLFEENLINASRVDAKAILSARLSKSRRLENLIAQLPGEKRNGLFGNLIALSLGLTPNFKSNFDLAEDAKLQLSKDTYDDDLDNLLAQIGDQYADLFLAAKNLSDAILLSDILRVNSEITKAPLSASMIKRYDEHHQDLTLLKALVRQQLPEKYKEIFFDQSKNGYAGYIDGGASQEEFYKFIKPILEKMDGTEELLAKLNREDLLRKQRTFDNGSIPHQIHLGELHAILRRQEDFYPFLKDNREKIEKILTFRIPYYVGPLARGNSRFAWMTRKSEETITPWNFEEVVDKGASAQSFIERMTNFDKNLPNEKVLPKHSLLYEYFTVYNELTKVKYVTEGMRKPAFLSGEQKKAIVDLLFKTNRKVTVKQLKEDYFKKIECFDSVEISGVEDRFNASLGTYHDLLKIIKDKDFLDNEENEDILEDIVLTLTLFEDREMIEERLKTYAHLFDDKVMKQLKRRRYTGWGRLSRKLINGIRDKQSGKTILDFLKSDGFANRNFMQLIHDDSLTFKEDIQKAQVSGQGDSLHEHIANLAGSPAIKKGILQTVKIVDELVKVMGRHKPENIVIEMARENQTTQKGQKNSRERMKRIEEGIKELGSDILKEYPVENTQLQNEKLYLYYLQNGRDMYVDQELDINRLSDYDVDHIVPQSFLKDDSIDNKVLTRSDKNRGKSDNVPSEEVVKKMKNYWKQLLNAKLITQRKFDNLTKAERGGLSELDKAGFIKRQLVETRQITKHVAQILDSRMNTKYDENDKLIREVKVITLKSKLVSDFRKDFQFYKVREINNYHHAHDAYLNAVVGTALIKKYPKLESEFVYGDYKVYDVRKMIAKSEQEIGKATAKYFFYSNIMNFFKTEITLANGEIRKRPLIETNGETGEIVWDKGRDFATVRKVLSMPQVNIVKKTEVQTGGFSKESILPKRNSDKLIARKKDWDPKKYGGFDSPTVAYSVLVVAKVEKGKSKKLKSVKELLGITIMERSSFEKNPIDFLEAKGYKEVRKDLIIKLPKYSLFELENGRKRMLASAGELQKGNELALPSKYVNFLYLASHYEKLKGSPEDNEQKQLFVEQHKHYLDEIIEQISEFSKRVILADANLDKVLSAYNKHRDKPIREQAENIIHLFTLTNLGAPAAFKYFDTTIGRNRYKSIKEVLDATLIHQSITGLYETRIDLSQLGGD

SEQ ID NO: 173 - protein, 1368 aa, Streptococcus pyogenes
MDKKYSIGLDIGTNSVGWAVITDDYKVPSKKFKVLGNTDRHSIKKNLIGALLFDSGETAEATRLKRTARRRYTRRKNRICYLQEIFSNEMAKVDDSFFHRLEESFLVEEDKKHERHPIFGNIVDEVAYHEKYPTIYHLRKKLADSTDKADLRLIYLALAHMIKFRGHFLIEGDLNPDNSDVDKLFIQLVQTYNQLFEENPINASRVDAKAILSARLSKSRRLENLIAQLPGEKKNGLFGNLIALLLGLTPNFKSNFDLAEDAKLQLSKDTYDDDLDNLLAQIGDQYADLFLAAKNLSDAILLSDILRVNSEITKAPLSASMIKRYDEHHQDLTLLKALVRQQLPEKYKEIFFDQSKNGYAGYIDGGASQEEFYKFIKPILEKMDGTEELLAKLNREDLLRKQRTFDNGSIPHQIHLGELHAILRRQEDFYPFLKDNREKIEKILTFRIPYYVGPLARGNSRFAWMTRKSEETITPWNFEEVVDKGASAQSFIERMTNFDKNLPNEKVLPKHSLLYEYFTVYNELTKVKYVTEGMRKPAFLSGEQKKAIVDLLFKTNRKVTVKQLKEDYFKKIECFDSVEISGVEDRFNASLGTYHDLLKIIKDKDFLDNEENEDILEDIVLTLTLFEDKEMIEERLKKYAHLFDDKVMKQLKRRRYTGWGRLSRKLINGIRDKQSGKTILDFLKSDGFANRNFMQLIHDDSLTFKEDIQKAQVSGQGDSLHEHIANLAGSPAIKKGILQTVKVVDELVKVMGRHKPENIVIEMARENQTTQKGQKNSRERMKRIEEGIKELGSDILKEYPVENTQLQNEKLYLYYLQNGRDMYVDQELDINRLSDYDVDHIVPQSFLKDDSIDNKVLTRSDKNRGKSDNVPSEEVVKKMKNYWKQLLNAKLITQRKFDNLTKAERGGLSELDKAGFIKRQLVETRQITKHVAQILDSRMNTKYDENDKLIREVRVITLKSKLVSDFRKDFQFYKVREINNYHHAHDAYLNAVVGTALIKKYPKLESEFVYGDYKVYDVRKMIAKSEQEIGKATAKYFFYSNIMNFFKTEITLANGEIRKRPLIETNGETGEIVWDKGRDFATVRKVLSMPQVNIVKKTEVQTGGFSKESILPKRNSDKLIARKKDWDPKKYGGFDSPTVAYSVLVVAKVEKGKSKKLKSVKELLGITIMERSSFEKNPIDFLEAKGYKEVRKDLIIKLPKYSLFELENGRKRMLASAGELQKGNELALPSKYVNFLYLASHYEKLKGSPEDNEQKQLFVEQHKHYLDEIIEQISEFSKRVILADANLDKVLSAYNKHRDKPIREQAENIIHLFTLTNLGAPAAFKYFDTTIDRKRYTSTKEVLDATLIHQSITGLYETRIDLSQLGGD

SEQ ID NO: 174 - protein, 1368 aa, Streptococcus pyogenes
MDKKYSIGLDIGTNSVGWAVITDDYKVPSKKFKVLGNTDRHSIKKNLIGALLFDSGETAEATRLKRTARRRYTRRKNRICYLQEIFSNEMAKVDDSFFHRLEESFLVEEDKKHERHPIFGNIVDEVAYHEKYPTIYHLRKKLADSTDKADLRLIYLALAHMIKFRGHFLIEGDLNPDNSDVDKLFIQLVQTYNQLFEENPINASRVDAKAILSARLSKSRRLENLIAQLPGEKKNGLFGNLIALSLGLTPNFKSNFDLAEDAKLQLSKDTYDDDLDNLLAQIGDQYADLFLAAKNLSDATLLSDILRVNSEITKAPLSASMIKRYDEHHQDLTLLKALVRQQLPEKYKEIFFDQSKNGYAGYIDGGASQEEFYKFIKPILEKMDGTEELLAKLNREDLLRKQRTFDNGSIPHQIHLGELHAILRRQEDFYPFLKDNREKIEKILTFRIPYYVGPLARGNSRFAWMTRKSEETITPWNFEEVVDKGASAQSFIERMTNFDKNLPNEKVLPKHSLLYEYFTVYNELTKVKYVTEGMRKPAFLSGEQKKAIVDLLFKTNRKVTVKQLKEDYFKKIECFDSVEISGVEDRFNASLGTYHDLLKIIKDKDFLDNEENEDILEDIVLTLTLFEDREMIEERLKTYAHLFDDKVMKQLKRRRYTGWGRLSRKLINGIRDKQSGKTILDFLKSDGFANRNFMQLIHDDSLTFKEDIQKAQVSGQGDSLHEHIANLAGSPAIKKGILQTVKVVDELVKVMGRHKPENIVIEMARENQTTQKGQKNSRERMKRIEEGIKELGSDILKEYPVENTQLQNEKLYLYYLQNGRDMYVDQELDINRLSDYDVDHIVPQSFLKDDSIDNKVLTRSDKNRGKSDNVPSEEVVKKMKNYWRQLLNAKLITQRKFDNLTKAERGGLSELDKAGFIKRQLVETRQITKHVAQILDSRMNTKYDENDKLIREVKVITLKSKLVSDFRKDFQFYKVREINNYHHAHDAYLNAVVGTALIKKYPKLESEFVYGDYKVYDVRKMIAKSEQEIGKATAKYFFYSNIMNFFKTEITLANGEIRKRPLIETNGETGEIVWDKGRDFATVRKVLSMPQVNIVKKTEVQTGGFSKESILPKRNSDKLIARKKDWDPKKYGGFDSPTVAYSVLVVAKVEKGKSKKLKSVKELLGITIMERSSFEKNPIDFLEAKGYKEVRKDLIIKLPKYSLFELENGRKRMLASAGELQKGNELALPSKYVNFLYLASHYEKLKGSPEDNEQKQLFVEQHKHYLDEIIEQISEFSKRVILADANLDKVLSAYNKHRDKPIREQAENIIHLFTLTNLGAPAAFKYFDTTIDRKRYTSTKEVLDATLIHQSITGLYETRIDLSQLGGD

SEQ ID NO: 175 - protein, 1368 aa, Streptococcus pyogenes
MDKKYSIGLDIGTNSVGWAVITDDYKVPSKKFKVLGNTDRHSIKKNLIGALLFDSGETAEATRLKRTARRRYTRRKNRICYLQEIFSNEMAKVDDSFFHRLEESFLVEEDKKHERHPIFGNIVDEVAYHEKYPTIYHLRKKLADSTDKADLRLIYLALAHMIKFRGHFLIEGDLNPDNSDVDKLFIQLVQTYNQLFEENPINASRVDAKAILSARLSKSRRLENLIAQLPGEKRNGLFGNLIALSLGLTPNFKSNFDLAEDAKLQLSKDTYDDDLDNLLAQIGDQYADLFLAAKNLSDAILLSDILRVNSEITKAPLSASMIKRYDEHHQDLTLLKALVRQQLPEKYKEIFFDQSKNGYAGYIDGGASQEEFYKFIKPILEKMDGTEELLAKLNREDLLRKQRTFDNGSIPHQIHLGELHAILRRQEDFYPFLKDNREKIEKILTFRIPYYVGPLARGNSRFAWMTRKSEETITPWNFEEVVDKGASAQSFIERMTNFDKNLPNEKVLPKHSLLYEYFTVYNELTKVKYVTEGMRKPEFLSGEQKKAIVDLLFKTNRKVTVKQLKEDYFKKIECFDSVEISGVEDRFNASLGTYHDLLKIIKDKDFLDNEENEDILEDIVLTLTLFEDREMIEERLKTYAHLFDDKVMKQLKRRRYTGWGRLSRKLINGIRDKQSGKTILDFLKSDGFANRNFMQLIHDDSLTFKEDIQKAQVSGQGDSLHEHIANLAGSPAIKKGILQTVKVVDELVKVMGRHKPENIVIEMARENQTTQKGQKNSRERMKRIEEGIKELGSDILKEYPVENTQLQNEKLYLYYLQNGRDMYVDQELDINRLSDYDVDHIVPQSFIKDDSIDNKVLTRSDKNRGKSDNVPSEEVVKKMKNYWKQLLNAKLITQRKFDNLTKAERGGLSELDKAGFIKRQLVETRQITKHVAQILDSRMNTKYDENDKLIREVKVITLKSKLVSDFRKDFQFYKVREINNYHHAHDAYLNAVVGTALIKKYPKLESEFVYGDYKVYDVRKMIAKSEQEIGKATAKYFFYSNIMNFFKTEITLANGEIRKRPLIETNGETGEIVWDKGRDFATVRKVLSMPQVNIVKKTEVQTGGFSKESILPKRNSDKLIARKKDWDPKKYGGFDSPTVAYSVLVVAKVEKGKSKKLKSVKELLGITIMERSSFEKNPIDFLEAKGYKEVRKDLIIKLPKYSLFELENGRKRMLASAGELQKGNELALPSKYVNFLYLASHYEKLKGSPEDNEQKQLFVEQHKHYLDEIIEQISEFSKRVILADANLDKVLSAYNKHRDKPIREQAENIIHLFTLTNFGAPAAFIYFDTTIGRNRYKSIKEVLDATLIHQSITGLYETRIDLSQLGGD

SEQ ID NO: 176 - protein, 1367 aa, Streptococcus pyogenes
MDKKYSIGLDIGTNSVGWAVITDDYKVPSKKFKVLGNTDRHSIKKNLIGALLFDSGETAEATRLKRTARRRYTRRKNRICYLQEIFSNEMAKVDDSFFHRLEESFLVEEDKKHERHPIFGNIVDEVAYHEKYPTIYHLRKKLADSTDKVDLRLIYLALAHMIKFRGHFLIEGDLNPDNSDVDKLFIQLVQTYNQLFEENPINASRVDAKAILSARLSKSRRLENLIAQLPGEKKNGLFGNLIALSLGLTPNFKSNFDLAEDTKLQLSKDTYDDDLDNLLAQIGDQYADLFLAAKNLSDAILLSDILRVNSEITKAPLSASMIKRYDEHHQDLTLLKALVRQQLPEKYKEIFFDQSKNGYAGYIDGGASQEEFYKFIKPILEKMDGTEELLAKLNREDLLRKQRTFDNGSIPYQIHLGELHAILRRQEDFYPFLKDNREKIEKILTFRIPYYVGPLARGNSRFAWMTRKSEETITPWNFEEVVDKGASAQSFIERMTNFDKNLPNEKVLPKHSLLYEYFTVYNELTKVKYVTEGMRKPAFLSGEQKKAIVDLLFKTNRKVTVKQLKEDYFKKIECFDSVEISGVEDRFNTSLGTYHDLLKIIKDKDFLDNEENEDILEDIVLTLTLFEDKEMIEERLKKYANLFDDKVMKQLKRRHYTGWGRLSRKLINGIRDKQSGKTILDFLKSDGFANRNFMQLINDDSLTFKEAIQKAQVSGQGHSLHEQIANLAGSPAIKKGILQTVKIVDELVKVMGHKPENIVIEMARENQTTQKGQKNSRERMKRIEEGIKELGSQILKEHPVENTQLQNEKLYLYYLQNGRDMYVDQELDINRLSDYDVDHIVPQSFLKDDSIDNKVLTRSDKNRGKSDNVPSEEVVKKMKNYWRQLLNAKLITQRKFDNLTKAERGGLSELDKAGFIKRQLVETRQITKHVAQILDSRMNTKYDENDKLIREVKVITLKSKLVSDFRKDFQFYKVREINNYHHAHDAYLNAVVGTALIKKYPKLESEFVYGDYKVYDVRKMIAKSEQEIGKATAKYFFYSNIMNFFKTEITLANGEIRKRPLIETNGETGEIVWDKGRDFATVRKVLSMPQVNIVKKTEVQTGGFSKESILPKRNSDKLIARKKDWDPKKYGGFDSPTVAYSVLVVAKVEKGKSKKLKSVKELLGITIMERSSFEKNPIDFLEAKGYKEVRKDLIIKLPKYSLFELENGRKRMLASAGELQKGNELALPSKYVNFLYLASHYEKLKGSPEDNEQKQLFVEQHKHYLDEIIEQISEFSKRVILADANLDKVLSAYNKHRDKPIREQAKNIIHLFTLTNLGAPAAFKYFDTTIERNRYKSIKEVLDATLIHQSITGLYETRIDLSQLGGD

SEQ ID NO: 177 - protein, 1368 aa, Streptococcus pyogenes
MDKKYSIGLDIGTNSVGWAVITDDYKVPSKKFKVLGNTDRHSIKKNLIGALLFDSGETAEATRLKRTARRRYTRRKNRICYLQEIFSNEMAKVDDSFFHRLEESFLVEEDKKHERHPIFGNIVDEVAYHEKYPTIYHLRKKLVDSTDKADLRLIYLALAHMIKFRGHFLIEGDLNPDNSDVDKLFIQLVQTYNQLFEENPINANGVDAKAILSARLSKSRRLENLIAQLPGEKKNGLFGNLIALSLGLTPNFKSNFDLAEDAKLQLSKDTYDDDLDNLLAQIGDQYADLFLAAKNLSDAILLSDILRVNTEITKAPLSASMIKRYDEHHQDLTLLKALVRQQLPEKYKEIFFDQSKNGYAGYIDGGASQEEFYKFIKPILEKMDGTEELLVKLNREDLLRKQRTFDNGSIPHQIHLGELHAILRRQEDFYPFLKDNREKIEKILTFRIPYYVGPLARGNSRFAWMTRKSEETITPWNFEEVVDKGASAQSFIERMTNFDKNLPNEKVLPKHSLLYEYFTVYNELTKVKYVTEGMRKPAFLSGEQKKAIVDLLFKTNRKVTVKQLKEDYFKKIECFDSVEISGVEDRFNASLGTYHDLLKIIKDKDFLDNEENEDILEDIVLTLTLFEDREMIEERLKTYAHLFDDKVMKQLKRRRYTGWGRLSRKLINGIRDKQSGKTILDFLKSDGFANRNFMQLIHDDSLTFKEDIQKAQVSGQGDSLHEHIANLAGSPAIKKGILQTVKVVDELVKVMGRHKPENIVIEMARENQTTQKGQKNSRERMKRIEEGIKELGSQILKEHPVENTQLQNEKLYLYYLQNGRDMYVDQELDINRLSDYDVDHIVPQSFLKDDSIDNKVLTRSDKNRGKSDNVPSEEVVKKMKNYWRQLLNAKLITQRKFDNLTKAERGGLSELDKAGFIKRQLVETRQITKHVAQILDSRMNTKYDENDKLIREVKVITLKSKLVSDFRKDFQFYKVREINNYHHAHDAYLNAVVGTALIKKYPKLESEFVYGDYKVYDVRKMIAKSEQEIGKATAKYFFYSNIMNFFKTEITLANGEIRKRPLIETNGETGEIVWDKGRDFATVRKVLSMPQVNIVKKTEVQTGGFSKESILPKRNSDKLIARKKDWDPKKYGGFDSPTVAYSVLVVAKVEKGKSKKLKSVKELLGITIMERSSFEKNPIDFLEAKGYKEVKKDLIIKLPKYSLFELENGRKRMLASAGELQKGNELALPSKYVNFLYLASHYEKLKGSPEDNEQKQLFVEQHKHYLDEIIEQISEFSKRVILADANLDKVLSAYNKHRDKPIREQAENIIHLFTLTNLGAPAAFKYFDTTIDRKRYTSTKEVLDATLIHQSITGLYETRIDLSQLGGD

SEQ ID NO: 178 - protein, 1368 aa, Streptococcus pyogenes
MDKKYSIGLDIGTNSVGWAVITDDYKVPSKKFKVLGNTDRHSIKKNLIGALLFDSGETAEATRLKRTARRRYTRRKNRICYLQEIFSNEMAKVDDSFFHRLEESFLVEEDKKHERHPIFGNIVDEVAYHEKYPTIYHLRKKLVDSTDKADLRLIYLALAHMIKFRGHFLIEGDLNPDNSDVDKLFIQLVQTYNQLFEENPINASGVDAKAILSARLSKSRRLENLIAQLPGEKKNGLFGNLIALSLGLTPNFKSNFDLAEDAKLQLSKDTYDDDLDNLLAQIGDQYADLFLAAKNLSDAILLSDILRLNSEITKAPLSASMIKRYDEHHQDLTLLKALVRQQLPEKYKEIFFDQSKNGYAGYIDGGASQEEFYKFIKPILEKMDGTEELLAKLNREDLLRKQRTFDNGSIPHQIHLGELHAILRRQEDFYPFLKDNREKIEKILTFRIPYYVGPLARGNSRFAWMTRKSEETITPWNFEEVVDKGASAQSFIERMTNFDKNLPNEKVLPKHSLLYEYFTVYNELTKVKYVTEGMRKPAFLSGEQKKAIVDLLFKTNRKVTVKQLKEDYFKKIECFDSVEISGVEDRFNASLGTYHDLLKIIKDKDFLDNEENEDILEDIVLTLTLFEDREMIEERLKTYAHLFDDKVMKQLKRRRYTGWGRLSRKLINGIRDKQSGKTILDFLKSDGFANRNFMQLIHDDSLTFKEDIQKAQVSGQGDSLHEHIANLAGSPAIKKGILQTVKVVDELVKVMGRHKPENIVIEMARENQTTQKGQKNSRERMKRIEEGIKELGSQILKEHPVENTQLQNEKLYLYYLQNGRDMYVDQELDINRLSDYDVDHIVPQSFIKDDSIDNKVLTRSDKNRGKSNNVPSEEVVKKMKNYWRQLLNAKLITQRKFDNLTKAERGGLSELDKAGFIKRQLVETRQITKHVAQILDSRMNTKYDENDKLIREVKVITLKSKLVSDFRKDFQFYKVREINNYHHAHDAYLNAVVGTALIKKYPKLESEFVYGDYKVYDVRKMIAKSEQEIGKATAKYFFYSNIMNFFKTEITLANGEIRKRPLIETNGETGEIVWDKGRDFATVRKVLSMPQVNIVKKTEVQTGGFSKESILPKRNSDKLIARKKDWDPKKYGGFDSPTVAYSVLVVAKVEKGKSKKLKSVKELLGITIMERSSFEKNPIDFLEAKGYKEVRKDLIVKLPKYSLFELENGRKRMLASAGELQKGNELALPSKYVNFLYLASHYEKLKGSPEDNEQKQLFVEQHKHYLDEIIEQISEFSKRVILADANLDKVLSAYNKHRDKPIREQAENIIHLFTLTNLGAPAAFKYFDTTIDRKRYTSTKEVLDATFIHQSITGLYETRIDLSQLGGD

SEQ ID NO: 179 - protein, 1368 aa, Streptococcus pyogenes
MDKKYSIGLDIGTNSVGWAVITDDYKVPSKKFKVLGNTDRHSIKKNLIGALLFDSGETAEATRLKRTARRRYTRRKNRICYLQEIFSNEMAKVDDSFFHRLEESFLVEEDKKHERHPIFGNIVDEVAYHEKYPTIYHLRKKLVDSTDKADLRLIYLALAHMIKFRGHFLIEGDLNPDNSDVDKLFIQLVQTYNQLFEENPINASGVDAKAILSARLSKSRRLENLIAQLPGEKKNGLFGNLIALSLGLTPNFKSNFDLAEDAKLQLSKDTYDDDLDNLLAQIGDQYADLFLAAKNLSDAILLSDILRVNTEITKAPLSASMIKRYDEHHQDLTLLKALVRQQLPEKYKEIFFDQSKNGYAGYIDGGASQEEFYKFIKPILEKMDGTEELLVKLNREDLLRKQRTFDNGSIPHQIHLGELHAILRRQEDFYPFLKDNREKIEKILTFRIPYYVGPLARGNSRFAWMTRKSEETITPWNFEEVVDKGASAQSFIERMTNFDKNLPNEKVLPKHSLLYEYFTVYNELTKVKYVTEGMRKPAFLSGEQKKAIVDLLFKTNRKVTVKQLKEDYFKKIECFDSVEISGVEDRFNASLGTYHDLLKIIKDKDFLDNEENEDILEDIVLTLTLFEDREMIEERLKTYAHLFDDKVMKQLKRRRYTGWGRLSRKLINGIRDKQSGKTILDFLKSDGFANRNFMQLIHDDSLTFKEDIQKAQVSGQGDSLHEHIANLAGSPAIKKGILQTVKVVDELVKVMGRHKPENIVIEMARENQTTQKGQKNSRERMKRIEEGIKELGSQILKEHPVENTQLQNEKLYLYYLQNGRDMYVDQELDINRLSDYDVDHIVPQSFLKDDSIDNKVLTRSDKNRGKSDNVPSEEVVKKMKNYWRQLLNAKLITQRKFDNLTKAERGGLSELDKAGFIKRQLVETRQITKHVAQILDSRMNTKYDENDKLIREVKVITLKSKLVSDFRKDFQFYKVREINNYHHAHDAYLNAVVGTALIKKYPKLESEFVYGDYKVYDVRKMIAKSEQEIGKATAKYFFYSNIMNFFKTEITLANGEIRKRPLIETNGETGEIVWDKGRDFATVRKVLSMPQVNIVKKTEVQTGGFSKESILPKRNSDKLIARKKDWDPKKYGGFDSPTVAYSVLVVAKVEKGKSKKLKSVKELLGITIMERSSFEKNPIDFLEAKGYKEVKKDLIIKLPKYSLFELENGRKRMLASAGELQKGNELALPSKYVNFLYLASHYEKLKGSPEDNEQKQLFVEQHKHYLDEIIEQISEFSKRVILADANLDKVLSAYNKHRDKPIREQAENIIHLFTLTNLGAPAAFKYFDTTIDRKRYTSTKEVLDATLIHQSITGLYETRIDLSQLGGD

SEQ ID NO: 180 - protein, 1368 aa, Streptococcus pyogenes
MDKKYSIGLDIGTNSVGWAVITDDYKVPSKKFKVLGNTDRHSIKKNLIGALLFDSGETAEATRLKRTARRRYTRRKNRICYLQEIFSNEMAKVDDSFFHRLEESFLVEEDKKHERHPIFGNIVDEVAYHEKYPTIYHLRKKLVDSTDKADLRLIYLALAHMIKFRGHFLIEGDLNPDNSDVDKLFIQLVQTYNQLFEENPINASGVDAKAILSARLSKSRRLENLIAQLPGEKKNGLFGNLIALSLGLTPNFKSNFDLAEDAKLQLSKDTYDDDLDNLLAQIGDQYADLFLAAKNLSDAILLSDILRLNSEITKAPLSASMIKRYDEHHQDLTLLKALVRQQLPEKYKEIFFDQSKNGYAGYIDGGASQEEFYKFIKPILEKMDGTEELLAKLNREDLLRKQRTFDNGSIPHQIHLGELHAILRRQEDFYPFLKDNREKIEKILTFRIPYYVGPLARGNSRFAWMTRKSEETITPWNFEEVVDKGASAQSFIERMTNFDKNLPNEKVLPKHSLLYEYFTVYNELTKVKYVTEGMRKPAFLSGEQKKAIVDLLFKTNRKVTVKQLKEDYFKKIECFDSVEISGVEDRFNASLGTYHDLLKIIKDKDFLDNEENEDILEDIVLTLTLFEDREMIEERLKTYAHLFDDKVMKQLKRRRYTGWGRLSRKLINGIRDKQSGKTILDFLKSDGFANRNFMQLIHDDSLTFKEDIQKAQVSGQGDSLHEHIANLAGSPAIKKGILQTVKVVDELVKVMGRHKPENIVIEMARENQTTQKGQKNSRERMKRIEEGIKELGSQILKEHPVENTQLQNEKLYLYYLQNGRDMYVDQELDINRLSDYDVDHIVPQSFIKDDSIDNKVLTRSDKNRGKSDNVPSEEVVKKMKNYWRQLLNAKLITQRKFDNLTKAERGGLSELDKAGFIKRQLVETRQITKHVAQILDSRMNTKYDENDKLIREVKVITLKSKLVSDFRKDFQFYKVREINNYHHAHDAYLNAVVGTALIKKYPKLESEFVYGDYKVYDVRKMIAKSEQEIGKATAKYFFYSNIMNFFKTEITLANGEIRKRPLIETNGETGEIVWDKGRDFATVRKVLSMPQVNIVKKTEVQTGGFSKESILPKRNSDKLIARKKDWDPKKYGGFDSPTVAYSVLVVAKVEKGKSKKLKSVKELLGLTIMERSSFEKNPIDFLEAKGYKEVKKDLIIKLPKYSLFELENGRKRMLASAGELQKGNELALPSKYVNFLYLASHYEKLKGSPEDNEQKQLFVEQHKHYLDEIIEQISEFSKRVILADANLDKVLSAYNKHRDKPIREQAENIIHLFTLTNLGAPAAFKYFDTTIDRKRYTSTKEVLDATLIHQSITGLYETRIDLSQLGGD

SEQ ID NO: 181 - protein, 1368 aa, Streptococcus pyogenes
MDKKYSIGLDIGTNSVGWAVITDDYKVPSKKFKVLGNTDRHSIKKNLIGALLFDSGETAEATRLKRTARRRYTRRKNRICYLQEIFSNEMAKVDDSFFHRLEESFLVEEDKKHERHPIFGNIVDEVAYHEKYPTIYHLRKKLVDSTDKADLRLIYLALAHMIKFRGHFLIEGDLNPDNSDVDKLFIQLVQTYNQLFEENPINASGVDAKAILSARLSKSRRLENLIAQLPGEKKNGLFGNLIALSLGLTPNFKSNFDLAEDAKLQLSKDTYDDDLDNLLAQIGDQYADLFLAAKNLSDAILLSDILRVNTEITKASLSASMIKRYDEHHQDLTLLKALVRQQLPEKYKEIFFDQSKNGYAGYIDGGASQEEFYKFIKPILEKMDGTEELLVKLNREDLLRKQRTFDNGSIPHQIHLGELHAILRRQEDFYPFLKDNREKIEKILTFRIPYYVGPLARGNSRFAWMTRKSEETITPWNFEEVVDKGASAQSFIERMTNFDKNLPNEKVLPKHSLLYEYFTVYNELTKVKYVTEGMRKPAFLSGEQKKAIVDLLFKTNRKVTVKQLKEDYFKKIECFDSVEISGVEDRFNASLGTYHDLLKIIKDKDFLDNEENEDILEDIVLTLTLFEDREMIEERLKTYAHLFDDKVMKQLKRRRYTGWGRLSRKLINGIRDKQSGKTILDFLKSDGFANRNFMQLIHDDSLTFKEDLQKAQVSGQGDSLHEHIANLAGSPAIKKGILQTVKVVDELVKVMGRHKPENIVIEMARENQTTQKGQKNSRERMKRIEEGIKELGSDILKEYPVENTQLQNEKLYLYYLQNGRDMYVDQELDINRLSDYDVDHIVPQSFIKDDSIDNKVLTRSDKNRGKSDNVPSEEVVKKMKNYWRQLLNAKLITQRKFDNLTKAERGGLSELDKAGFIKRQLVETRQITKHVAQILDSRMNTKYDENDKLIREVKVITLKSKLVSDFRKDFQFYKVREINNYHHAHDAYLNAVVGTALIKKYPKLESEFVYGDYKVYDVRKMIAKSEQEIGKATAKYFFYSNIMNFFKTEITLANGEIRKRPLIETNGETGEIVWDKGRDFATVRKVLSMPQVNIVKKTEVQTGGFSKESILPKRNSDKLIARKKDWDPKKYGGFDSPTVAYSVLVVAKVEKGKSKKLKSVKELLGITIMERSSFEKNPIDFLEAKGYKEVRKDLIIKLPKYSLFELENGRKRMLASAGELQKGNELALPSKYVNFLYLASHYEKLKGSPEDNEQKQLFVEQHKHYLDEIIEQISEFSKRVILADANLDKVLSAYNKHRDKPIREQAENIIHLFTLTNLGAPAAFKYFDTTIGRNRYKSIKEVLDATLIHQSITGLYETRIDLSQLGGD

SEQ ID NO: 182 - protein, 1371 aa, Streptococcus dysgalactiae
MDKKYSIGLDIGTNSVGWAVITDDYKVPSKKFKVLGNTDRHSIKKNLIGALLFDSGETAEATRLKRTARRRYTRRKNRIRYLQEIFSSEMSKVDDSFFHRLEESFLVEEDKKHERHPIFGNIVDEVAYHEKYPTIYHLRKKLADSTDKADLRLIYLALAHMIKFRGHFLIEGDLNPDNSDMDKLFIQLVQTYNQLFEENPINASRVDAKAILSARLSKSRRLENLIAQLPGEKRNGLFGNLIALSLGLTPNFKSNFDLAEDAKLQLSKDTYDDDLDNLLAQIGDQYADLFLAAKNLSDAILLSDILRVNSEITKAPLSASMIKRYDEHHQDLTLLKALVRQQLPEKYKEIFFDQSKNGYAGYIDGGASQEEFYKFIKPILEKMDGTEELLAKLNREDLLRKQRTFDNGSIPHQIHLGELHAILRRQEDFYPFLKDNREKIEKILTFRIPYYVGPLARGNSRFAWMTRKSEETITPWNFEEVVDKGASAQSFIERMTNFDKNLPNEKVLPKHSLLYEYFTVYNELTKVKYVTEGMRKPEFLSGKQKEAIVDLLFKTNRKVTVKQLKEDYFKKIECFDSVEISGVEDRFNASLGTYHDLLKIIKDKDFLDNEENEDILEDIVLTLTLFEDKEMIEERLKKYANLFDDKVMKQLKRRHYTGWGRLSRKLINGIRDKQSGKTILDFLKSDGFANRNFMQLINDDSLTFKEAIQKAQVSGQGHSLHEQIANLAGSPAIKKGILQSVKVVDELVKVMGHKPENIVIEMARENQTTQKGQKNSRERMKRIEEGIKELGSQILKEHPVENTQLQNEKLYLYYLQNGRDMYVDQELDINRLSDYDVDHIVPQSFIKDDSIDNKILTRSDKNRGKSDNVPSEEVVKKMKNYWRQLLNAKLITQRKFDNLTKAERGGLSELDKAGFIKRQLVETRQITKHVAQILDSRMNTKYDENDKLIREVKVITLKSKLVSDFRKDFQFYKVREINNYHHAHDAYLNAVVGTALIKKYTKLESEFVYGDYKVYDVRKMIAKSEQEIGKATAKRFFYSNIMNFFKTEITLANGEIRKRPLIETNEETGEIVWDKGRDFATVRKVLSMPQVNIVKKTEVQTGALTNESIYARGSFDKLISRKHRFESSKYGGFGSPTVTYSVLVVAKSKVQDGKVKKIKTGKELIGMTLLDKLVFEKNPLKFIEDKGYGNVQIDKCIKLPKYSLFEFENGTRRMLASVMANNNSRGDLQKANEMFLPAKLVTLLYHAHKIESSKELEHEAYILDHYNDLYQLLSYIERFASLYVDVEKNISKVKELFSNIESYSISEICSSVINLLTLTASGAPADFKFLGTTIPRKRYGSPQSILSSTLIHQSITGLYETRIDLSQLGGD

SEQ ID NO: 183 - protein, 1371 aa, Streptococcus dysgalactiae
MDKKYSIGLDIGTNSVGWAVITDDYKVPSKKFKVLGNTDRHSIKKNLIGALLFDSGETAEATRLKRTARRRYTRRKNRIRYLQEIFSSEMSKVDDSFFHRLEESFLVEEDKKHERHPIFGNIVDEVAYHEKYPTIYHLRKKLADSTDKADLRLIYLALAHMIKFRGHFLIEGDLNPDNSDMDKLFIQLVQTYNQLFEENPINASRVDAKAILSARLSKSRRLENLIAQLPGEKRNGLFGNLIALSLGLTPNFKSNFDLAEDAKLQLSKDTYDDDLDNLLAQIGDQYADLFLAAKNLSDAILLSDILRVNSEITKAPLSASMIKRYDEHHQDLTLLKALVRQQLPEKYKEIFFDQSKNGYAGYIDGGASQEEFYKFIKPILEKMDGTEELLAKLNREDLLRKQRTFDNGSIPHQIHLGELHAILRRQEDFYPFLKDNREKIEKILTFRIPYYVGPLARGNSRFAWMTRKSEETITPWNFEEVVDKGASAQSFIERMTNFDKNLPNEKVLPKHSLLYEYFTVYNELTKVKYVTEGMRKPEFLSGKQKEAIVDLLFKTNRKVTVKQLKEDYFKKIECFDSVEISGVEDRFNASLGTYHDLLKIIKDKDFLDNEENEDILEDIVLTLTLFEDKEMIEERLKTYAHLFDDKVMKQLKRRHYTGWGRLSRKLINGIRDKQSGKTILDFLKSDGFANRNFIQLIHDDSLTFKEAIQKAQVSGQGHSLHEQIANLAGSPAIKKGILQSVKVVDELVKVMGHKPENIVIEMARENQTTQKGQKNSRERMKRIEEGIKELGSQILKEHPVENTQLQNEKLYLYYLQNGRDMYVDQELDINRLSDYDVDHIVPQSFIKDDSIDNKVLTRSDKNRGKSDDVPSEEVVKKMKNYWRQLLNAKLITQRKFDNLTKAERGGLSELDKAGFIKRQLVETRQITKHVAQILDSRMNTKYDENDKLIREVKVITLKSKLVSDFRKDFQFYKVREINNYHHAHDAYLNAVVGTALIKKYPKLESEFVYGDYKVYDVRKMIAKSEQEIGKATAKRFFYSNIMNFFKTEITLANGEIRKRPLIETNEETGEIVWNKGRDFATVRKVLSMPQVNIVKKTEVQTGALTNESIYARGSFDKLISRKHRFESSKYGGFGSPTVTYSVLVVAKSKVQDGKVKKIKTGKELIGITLLDKLVFEKNPLKFIEDKGYGNVQIDKCIKLPKYSLFEFENGTRRMLASVMANNNSRGDLQKANEMFLPAKLVTLLYHAHKIESSKELEHEAYILDHYNDLYQLLSYIERFASLYVDVEKNISKVKELFSNIESYSISEICSSVINLLTLTASGAPADFKFLGTTIPRKRYGSPQSILSSTLIHQSITGLYETRIDLSQLGGD

SEQ ID NO: 184 - protein, 1371 aa, Streptococcus dysgalactiae
MDKKYSIGLDIGTNSVGWAVITDDYKVPSKKFKVLGNTDRHSIKKNLIGALLFDSGETAEATRLKRTARRRYTRRKNRIRYLQEIFSSEMSKVDDSFFHRLEESFLVEEDKKHERHPIFGNIVDEVAYHEKYPTIYHLRKKLADSTDKADLRLIYLALAHMIKFRGHFLIEGDLNPDNSDMDKLFIQLVQTYNQLFEENPINASRVDAKAILSARLSKSRRLENLIAQLPGEKRNGLFGNLIALSLGLTPNFKSNFDLAEDAKLQLSKDTYDDDLDNLLAQIGDQYADLFLAAKNLSDAILLSDILRVNSEITKAPLSASMIKRYDEHHQDLTLLKALVRQQLPEKYKEIFFDQSKNGYAGYIDGGASQEEFYKFIKPILEKMDGTEELLAKLNREDLLRKQRTFDNGSIPHQIHLGELHAILRRQEDFYPFLKDNREKIEKILTFRIPYYVGPLARGNSRFAWMTRKSEETITPWNFEEVVDKGASAQSFIERMTNFDKNLPNEKVLPKHSLLYEYFTVYNELTKVKYVTEGMRKPEFLSGKQKEAIVDLLFKTNRKVTVKQLKEDYFKKIECFDSVEISGVEDRFNASLGTYHDLLKIIKDKDFLDNEENEDILEDIVLTLTLFEDKEMIEERLKKYANLFDDKVMKQLKRRHYTGWGRLSRKLINGIRDKQSGKTILDFLKSDGFANRNFMQLINDDSLTFKEAIQKAQVSGQGHSLHEQIANLAGSPAIKKGILQSVKVVDELVKVMGHKPENIVIEMARENQTTQKGQKNSRERMKRIEEGIKELGSQILKEHPVENTQLQNEKLYLYYLQNGRDMYVDQELDINRLSDYDVDHIVPQSFIKDDSIDNKVLTRSDKNRGKSDNVPSEEVVKKMKNYWRQLLNAKLITQRKFDNLTKAERGGLSELDKAGFIKRQLVETRQITKHVAQILDSRMNTKYDENDKLIREVKVITLKSKLVSDFRKDFQFYKVREINNYHHAHDAYLNAVVGTALIKKYPKLESEFVYGDYKVYDVRKMIAKSEQEIGKATAKRFFYSNIMNFFKTEITLANGEIRKRPLIETNEETGEIVWDKGRDFATVRKVLSMPQVNIVKKTEVQTGALTNESIYARGSFDKLISRKHRFESSKYGGFGSPTVTYSVLVVAKSKVQDGKVKKIKTGKELIGITLLDKLVFEKNPLKFIEDKGYGNVQIDKCIKLPKYSLFEFENGTRRMLASVMANNNSRGDLQKANEMFLPAKLVTLLYHAHKIESSKELEHEAYILDHYNDLYQLLSYIERFASLYVDVEKNISKVKELFSNIESYSISEICSSVINLLTLTASGAPADFKFLGTTIPRKRYGSPQSILSSTLIHQSITGLYETRIDLSQLGGD

SEQ ID NO: 185 - protein, 1371 aa, Streptococcus dysgalactiae
MDKKYSIGLDIGTNSVGWAVITDDYKVPSKKFKVLGNTDRHSIKKNLIGALLFDSGETAEATRLKRTARRRYTRRKNRIRYLQEIFSSEMSKVDDSFFHRLEESFLVEEDKKHERHPIFGNIVDEVAYHEKYPTIYHLRKKLADSTDKADLRLIYLALAHMIKFRGHFLIEGDLNPDNSDMDKLFIQLVQTYNQLFEENPINASRVDAKAILSARLSKSRRLENLIAQLPGEKRNGLFGNLIALSLGLTPNFKSNFDLAEDAKLQLSKDTYDDDLDNLLAQIGDQYADLFLAAKNLSDAILLSDILRVNSEITKAPLSASMIKRYDEHHQDLTLLKALVRQQLPEKYKEIFFDQSKNGYAGYIDGGASQEEFYKFIKPILEKMDGTEELLAKLNREDLLRKQRTFDNGSIPHQIHLGELHAILRRQEDFYPFLKDNREKIEKILTFRIPYYVGPLARGNSRFAWMTRKSEETITPWNFEEVVDKGASAQSFIERMTNFDKNLPNEKVLPKHSLLYEYFTVYNELTKVKYVTEGMRKPEFLSGKQKEAIVDLLFKTNRKVTVKQLKEDYFKKIECFDSVEISGVEDRFNASLGTYHDLLKIIKDKDFLDNEENEDILEDIVLTLTLFEDKEMIEERLKTYAHLFDDKVMKQLKRRHYTGWGRLSRKLINGIRDKQSGKTILDFLKSDGFANRNFIQLIHDDSLTFKEAIQKAQVSGQGHSLHEQIANLAGSPAIKKGILQSVKVVDELVKVMGHKPENIVIEMARENQTTQKGQKNSRERMKRIEEGIKELGSQILKEHPVENTQLQNEKLYLYYLQNGRDMYVDQELDINRLSDYDVDHIVPQSFIKDDSIDNKVLTRSDKNRGKSDDVPSEEVVKKMKNYWRQLLNAKLITQRKFDNLTKAERGGLSELDKAGFIKRQLVETRQITKHVAQILDSRMNTKYDENDKLIREVKVITLKSKLVSDFRKDFQFYKVREINNYHHAHDAYLNAVVGTALIKKYPKLESEFVYGDYKVYDVRKMIAKSEQEIGKATAKRFFYSNIMNFFKTEITLANGEIRKRPLIETNEETGEIVWDKGRDFATVRKVLSMPQVNIVKKTEVQTGALTNESIYARGSFDKLISRKHRFESSKYGGFGSPTVTYSVLVVAKCKVQDGKVKKIKTGKELIGITLLDKLVFEKNPLKFIEDKGYGNVQIDKCIKLPKYSLFEFENGTRRMLASVMANNNSRGDLQKANEMFLPAKLVTLLYHAHKIESSKELEHEAYILDHYNDLYQLLSYIERFASLYVDVEKNISKVKELFSNIESYSISEICSSVINLLTLTASGAPADFKFLGTTIPRKRYGSPQSILSSTLIHQSITGLYETRIDLSQLGGD

SEQ ID NO: 186 - protein, 1371 aa, Streptococcus dysgalactiae
MDKKYSIGLDIGTNSVGWAVITDDYKVPSKKFKVLGNTDRHSIKKNLIGALLFDSGETAEATRLKRTARRRYTRRKNRIRYLQEIFSSEMSKVDDSFFHRLEESFLVEEDKKHERHPIFGNIVDEVAYHEKYPTIYHLRKKLADSTDKADLRLIYLALAHMIKFRGHFLIEGDLNPDNSDVDKLFIQLVQTYNQLFEEKPINASGVDAKAILSARLSKSKRLENLIAQLPGEKKNGLFGNLIALSLGLTPNFKSNFDLAEDAKLQLSKDTYDDDLDNLLAQIGNQYADLFLAAKNLSDAILLSDILRVNSEITKAPLSASMIKRYDEHHQDLTLLKALVRQQLPEKYKEIFFDQSKNGYAGYIDGGASQEEFYKFIKPILEKMDGTEELLAKLNREDLLRKQRTFDNGSIPHQIHLGELHAILRRQEDFYPFLKDNREKIEKILTFRIPYYVGPLARGNSRFAWMTRKSEETITPWNFEEVVDKGASAQSFIERMTNFDKNLPNEKVLPKHSLLYEYFTVYNELTKVKYVTEGMRKPEFLSGKQKEAIVDLLFKTNRKVTVKQLKEDYFKKIECFDSVEISGVEDRFNASLGTYHDLLKIIKDKDFLDNEENEDILEDIVLTLTLFEDKEMIEERLKKYANLFDDKVMKQLKRRHYTGWGRLSRKLINGIRDKQSGKTILDFLKSDGFANRNFMQLINDDSLTFKEAIQKAQVSGQGHSLHEQIANLAGSPAIKKGILQSVKVVDELVKVMGHKPENIVIEMARENQTTQKGQKNSRERMKRIEEGIKELGSQILKEHPVENTQLQNEKLYLYYLQNGRDMYVDQELDINRLSDYDVDHIVPQSFIKDDSIDNKVLTRSDKNRGKSDNVPSEEVVKKMKNYWRQLLNAKLITQRKFDNLTKAERGGLSELDKAGFIKRQLVETRQITKHVAQILDSRMNTKYDENDKLIREVKVITLKSKLVSDFRKDFQFYKVREINNYHHAHDAYLNAVVGTALIKKYPKLESEFVYGDYKVYDVRKMIAKSEQEIGKATAKRFFYSNIMNFFKTEITLANGEIRKRPLIETNEETGEIVWDKGRDFATVRKVLSMPQVNIVKKTEVQTGALTNESIYARGSFDKLISRKHRFESSKYGGFGSPTVTYSVLVVAKSKVQDGKVKKIKTGKELIGITLLDKLVFEKNPLKFIEDKGYGNVQIDKCIKLPKYSLFEFENGTRRMLASVMANNNSRGDLQKANEMFLPAKLVTLLYHAHKIESSKELEHEAYILDHYNDLYQLLSYIERFASLYVDVEKNISKVKELFSNIESYSISEICSSVINLLTLTASGAPADFKFLGTTIPRKRYGSPQSILSSTLIHQSITGLYETRIDLSQLGGD

SEQ ID NO: 187 - protein, 1367 aa, Streptococcus pyogenes; identical to SEQ ID NO: 2

SEQ ID NO: 188 - protein, 1368 aa, Streptococcus pyogenes
MDKKYSIGLDIGTNSVGWAVITDDYKVPSKKLKGLGNTDRHGIKKNLIGALLFDSGETAEATRLKRTARRRYTRRKNRICYLQEIFSNEMAKVDDSFFHRLEESFLVEEDKKHERHPIFGNIVDEVAYHEKYPTIYHLRKKLADSTDKVDLRLIYLALAHMIKFRGHFLIEGDLNPDNSDVDKLFIQLVQTYNQLFEENPINASRVDAKAILSARLSKSRRLENLIAQLPGEKKNGLFGNLIALSLGLTPNFKSNFDLAEDAKLQLSKDTYDDDLDNLLAQIGDQYADLFLAAKNLSDATLLSDILRVNSEITKAPLSASMIKRYDEHHQDLTLLKALVRQQLPEKYKEIFFDQSKNGYAGYIDGGASQEEFYKFIKPILEKMDGTEELLAKLNREDLLRKQRTFDNGSIPYQIHLGELHAILRRQEDFYPFLKDNREKIEKILTFRIPYYVGPLARGNSRFAWMTRKSEETITPWNFEEVVDKGASAQSFIERMTNFDKNLPNEKVLPKHSLLYEYFTVYNELTKVKYVTEGMRKPAFLSGEQKKAIVDLLFKTNRKVTVKQLKEDYFKKIECFDSVEISGVEDRFNASLGTYHDLLKIIKDKDFLDNEENEDILEDIVLTLTLFEDREMIEERLKTYAHLFDDKVMKQLKRRRYTGWGRLSRKLINGIRDKQSGKTILDFLKSDGFANRNFMQLIHDDSLTFKEDIQKAQVSGQGDSLHEHIANLAGSPAIKKGILQTVKVVDELVKVMGRHKPENIVIEMARENQTTQKGQKNSRERMKRIEEGIKELGSDILKEYPVENTQLQNEKLYLYYLQNGRDMYVDQELDINRLSDYDVDHIVPQSFLKDDSIDNKVLTRSDKNRGKSDNVPSEEVVKKMKNYWRQLLNAKLITQRKFDNLTKAERGGLSELDKVGFIKRQLVETRQITKHVAQILDSRMNTKYDENDKLIREVRVITLKSKLVSDFRKDFQFYKVREINNYHHAHDAYLNAVVGTALIKKYPKLESEFVYGDYKVYDVRKMIAKSEQEIGKATAKYFFYSNIMNFFKTEITLANGEIRKRPLIETNGETGEIVWDKGRDFATVRKVLSMPQVNIVKKTEVQTGGFSKESILPKRNSDKLIARKKDWDPKKYGGFDSPTVAYSVLVVAKVEKGKSKKLKSVKELLGITIMERSSFEKDPIDFLEAKGYKEVRKDLIIKLPKYSLFELENGRKRMLASAGELQKGNELALPSKYVNFLYLASHYEKLKGSPEDNEQKQLFVEQHKHYLDEIIEQISEFSKRVILADANLDKVLSAYNKHRDKPIREQAENIIHLFTLTNLGAPAAFKYFDTTIDRKRYTSTKEVLDATLIHQSITGLYETRIDLSQLGGD

SEQ ID NO: 189 - protein, 1367 aa, Streptococcus pyogenes
MDKKYSIGLDIGTNSVGWAVITDDYKVPSKKLKVLGNTDRHGIKKNLIGALLFDSGETAEATRLKRTARRRYTRRKNRICYLQEIFSNEMAKVDDSFFHRLEESFLVEEDKKHERHPIFGNIVDEVAYHEKYPTIYHLRKKLADSTDKVDLRLIYLALAHMIKFRGHFLIEGDLNPDNSDVDKLFIQLVQTYNQLFEENPINASRVDAKAILSARLSKSRRLENLIAQLPGEKKNGLFGNLIALSLGLTPNFKSNFDLAEDAKLQLSKDTYDDDLDNLLAQIGDQYADLFLAAKNLSDAILLSDILRVNSEITKAPLSASMIKRYDEHHQDLTLLKALVRQQLPEKYKEIFFDQSKNGYAGYIDGGASQEEFYKFIKPILEKMDGTEELLAKLNREDLLRKQRTFDNGSIPYQIHLGELHAILRRQEDFYPFLKDNREKIEKILTFRIPYYVGPLARGNSRFAWMTRKSEETITPWNFEEVVDKGASAQSFIERMTNFDKNLPNEKVLPKHSLLYEYFTVYNELTKVKYVTEGMRKPAFLSGEQKKAIVDLLFKTNRKVTVKQLKEDYFKKIECFDSVEISGVEDRFNTSLGTYHDLLKIIKDKDFLDNEENEDILEDIVLTLTLFEDKEMIEERLKKYANLFDDKVMKQLKRRHYTGWGRLSRKLINGIRDKQSGKTILDFLKSDGFANRNFMQLINDDSLTFKEAIQKAQVSGQGHSLHEQIANLAGSPAIKKGILQTVKIVDELVKVMGHKPENIVIEMARENQTTQKGQKNSRERMKRIEEGIKELGSQILKEHPVENTQLQNEKLYLYYLQNGRDMYVDQELDINRLSDYDVDHIVPQSFLKDDSIDNKVLTRSDKNRGKSDNVPSEEVVKKMKNYWRQLLNAKLITQRKFDNLTKAERGGLSELDKAGFIKRQLVETRQITKHVAQILDSRMNTKYDENDKLIREVKVITLKSKLVSDFRKDFQFYKVREINNYHHAHDAYLNAVVGTALIKKYPKLESEFVYGDYKVYDVRKMIAKSEQEIGKATAKYFFYSNIMNFFKTEITLANGEIRKRPLIETNGETGEIVWDKGRDFATVRKVLSMPQVNIVKKTEVQTGGFSKESILPKRNSDKLIARKKDWDPKKYGGFDSPTVAYSVLVVAKVEKGKSKKLKSVKELLGITIMERSSFEKNPIDFLEAKGYKEVRKDLIIKLPKYSLFELENGRKRMLASAGELQKGNELALPSKYVNFLYLASHYEKLKGSPEDNEQKQLFVEQHKHYLDEIIEQISEFSKRVILADANLDKVLSAYNKHRDKPIREQAKNIIHLFTLTNLGAPAAFKYFDTTIERNRYKSIKEVLDATLIHQSITGLYETRIDLSQLGGD

SEQ ID NO: 190 - protein, 1367 aa, Streptococcus pyogenes
MDKKYSIGLDIGTNSVGWAVITDDYKVPSKKLKVLGNTDRHGIKKNLIGALLFDSGETAEATRLKRTARRRYTRRKNRICYLQEIFSNEMAKVDDSFFHRLEESFLVEEDKKHERHPIFGNIVDEVAYHEKYPTIYHLRKKLADSTDKVDLRLIYLALAHMIKFRGHFLIEGDLNPDNSDVDKLFIQLVQTYNQLFEENPINASRVDAKAILSARLSKSRRLENLIAQLPGEKKNGLFGNLIALSLGLTPNFKSNFDLAEDAKLQLSKDTYDDDLDNLLAQIGDQYADLFLAAKNLSDAILLSDILRVNSEITKAPLSASMIKRYDEHHQDLTLLKALVRQQLPEKYKEIFFDQSKNGYAGYIDGGASQEEFYKFIKPILEKMDGTEELLAKLNREDLLRKQRTFDNGSIPYQIHLGELHAILRRQEDFYPFLKDNREKIEKILTFRIPYYVGPLARGNSRFAWMTRKSEETITPWNFEEVVDKGASAQSFIERMTNFDKNLPNEKVLPKHSLLYEYFTVYNELTKVKYVTEGMRKPAFLSGEQKKAIVDLLFKTNRKVTVKQLKEDYFKKIECFDSVEISGVEDRFNTSLGTYHDLLKIIKDKDFLDNEENEDILEDIVLTLTLFEDKEMIEERLKKYANLFDDKVMKQLKRRHYTGWGRLSRKLINGIRDKQSGKTILDFLKSDGFANRNFMQLINDDSLTFKEAIQKAQVSGQGHSLHEQIANLAGSPAIKKGILQTVKIVDELVKVMGHKPENIVIEMARENQTTQKGQKNSRERMKRIEEGIKELGSQILKEHPVENTQLQNEKLYLYYLQNGRDMYVDQELDINRLSDYDVDHIVPQSFLKDDSIDNKVLTRSDKNRGKSDNVPSEEVVKKMKNYWRQLLNAKLITQRKFDNLTKAERGGLSELDKAGFIKRQLVETRQITKHVAQILDSRMNTKYDENDKLIREVKVITLKSKLVSDFRKDFQFYKVREINNYHHAHDAYLNAVVGTALIKKYPKLESEFVYGDYKVYDVRKMIAKSEQEIGKATAKYFFYSNIMNFFKTEITLANGEIRKRPLIETNGETGEIVWDKGRDFATVRKVLSMPQVNIVKKTEVQTGGFSKESILPKRNSDKLIARKKDWDPKKYGGFDSPTVAYSVLVVAKVEKGKSKKLKSVKELLGITIMERSSFEKNPIDFLEAKGYKEVRKDLIIKLPKYSLFELENGRKRMLASAGELQKGNELALPSKYVNFLYLASHYEKLKGSPEDNEQKQLFVEQHKHYLDEIIEQISEFSKRVILADANLDKVLSAYNKHRDKPIREQAKNIIHLFTLTNLGAPAAFKYFDTTIERNRYKSIKEVLDATLIHQSITGLYEIRIDLSQLGGD

SEQ ID NO: 191 - protein, 1368 aa, Streptococcus pyogenes [sequence omitted]

SEQ ID NO: 192 - protein, 1368 aa, Streptococcus pyogenes [sequence omitted]

SEQ ID NO: 193 - protein, 1345 aa, Unknown
  Streptococcus - multispecies
MDQKYSIGLDIGTNSVGWAVVTDDYKVPAKKMKVLGNTDKQSIKKNLLGALLFDSGETAEATRLKRTARRRYTRRRNRLRYLQEIFAEEMNKVDENFFQRLDDSFLVDEDKRGERHPIFGNIAAEVKYHDDFPTIYHLRKHLADISQKADLRLVYLALAHMIKFRGHFLIEGQLKAENTNVQALFKDFVEVYDKTVEESHLSEMTVDALSILTEKVSKSRRLENLIAHYPAEKKNTLFGNLIALSLGLQPNFKTNFQLSEDAKLQFSKDTYEEDLEGLLGEIGDEYADLFASAKNLYDAILLSGILTVDDNSTKAPLSASMVKRYEEHQKDLKKLKDFIKVNAPDQYNAIFKDKNKKGYAGYIENGVKQDEFYKYLKGILLQINGSGDFLDKIDREDFLRKQRTFDNGSIPHQIHLQEMHAILRRQEEHYPFLKENQDKIEKILTFRIPYYVGPLARKGSRFAWAEYKADEKITPWNFDDILDKEKSAEKFITRMTLNDLYLPEEKVLPKHSLLYETFTVYNELTKVKYVNEQGEAKFFDANMKQEIFDHVFKENRKVTKDKLLNYLNKEFEEFRIVNLTGLDKENKAFNSSLGTYHDLRKILDKSFLDDKANEKTIEDIIQTLTLFEDREMIRQRLQKYSDIFTKAQLKKLERRHYTGWGRLSYKLINGIRNKENKKTILDYLIDDGYANRNFMQLINDDALSFKEEIARAQIIGDVDDIANVVHDLPGSPAIKKGILQSVKIVDELVKVMGHNPANIIIEMARENQMTDKGRRNSQQRLKLLQDSLKNLDNPVNIKNVENQQLQNDRLFLYYIQNGKDMYTGETLDINNLSQYDIDHIIPQAFIKDNSLDNRVLTRSDKNRGKSDDVPSIEVVHEMKSFWSKLLSVKLITQRKFDNLTKAERGGLTEEDKAGFIKRQLVETRQITKHVAQILDERFNTEFDGNKRRIRNVKIITLKSNLVSNFRKEFELYKVREINDYHHAHDAYLNAVVGNALLLKYPQLEPEFVYGEYPKYNSYRSRKSATEKFLFYSNILRFFKKEDIQTNEDGEIAWNKEKHIKILRKVLSYPQVNIVKKTEEQTGGFSKESILPKGESDKLIPRKTKNSYWNPKKYGGFDSPVVAYSILVFADVEKGKSKKLRKVQDMVGITIMEKKRFEKHPVDFLEQRGYRNVRLEKIIKLPKYSLFELENKRRRLLASARELQKGNELVIPQRFTTLLYHSYQIEKNYEPEHREYVEKHKDEFKELLEYISVFSRKYVLADNNLTKIEMLFSKNKDAEVSSLAKSFISLLTFTAFGAPAAFNFFGENIDRKRYTSVTECLNATLIHQSITGLYETRIDLSKLGED

SEQ ID NO: 194 - protein, 1330 aa, Enterococcus mundtii
MEKEYTIGLDIGTNSVGWAVLTDDYRLVARKMSIQGDSNRKKIKKNFWGARLFEEGKTAQFRRIKRTNRRRIARRRQRVLALQDIFAEEIHKKDPNFFARLEEGDRVEADKRFAKFPVFATLSEEKNYHRQYPTIYHLRHDLANSKEQADIRLVYLAIAHCLKYRGHFLFEGELDTENTSVTENYQQFLQAYQQFFPEPIGDLDDAVPILTERLSKAKRVEKVLAYYPSEKSTGNFAQFLKLMVGNQANFKKTFDLEEEMKLNFTRDCYEEDLNELLEKTSDDYAELFLKAKGVYDAILLSQILSKSDDETKAKLSANMKLRFEEHQRDLKQLKELVRRDLPKKYDDFFKNRSKNGYAGYVKGKATQEDFYKFLRTELAGLEESQSIMEKIDLEIYLLKQRTFANGVIPHQIHLVEMREIMDRQKRFYPFLKGAQGKIEKLLTFRIPYYVGPLAQEGQSPFAWIKRKSPSQITPWNFAEVVDKENSAIEFIERMTNQDTYLPKEKVLPKQSLIYQRFMIFNELTKVSYTDERGKSHYFSSEQKRKIFNELFKQHPRVTEKQLRKFLELNEQIDSTEIKGIETSFNASYSTYHDLLKLSDQMDTLLDDPDMTTMFEEIIKILTIFEDREMIREQLKPYETVLGLPAIKKLAKKHYTGWGRLSEKMIQGMREKQSRKTILDYLIDDDDFPCNRNRNFMQLINDDHLSFKETIANELIMSDSNVLLDQVKAIPGSPAVKKGIWQSIKIVEEIIGIIGKAPKNIVIEMARENQRTSRSRPRLKALEEALKNIDSPLLKDYPTDNQALQKDRLYLYYLQNGKDMYTGEPLEIHRLSEYDIDHIIPRSFIVDNSLDNKVLVSSKVNRGKLDNAPDPLVVKRMRSHWEKLHQAKLISDKKLANLTKQNLTEADKARFIQRQLVETRQITKHVANLLHQHFNLPEEVSATEKTSIITLKSTLTSQFRQMFDIYKVREINHHHHAHDAYLNGVVAMTLLKKYPKLAPEFVYGSYIKGDINQINKATAKKEFYSNIMKFFESEEIICDEQGEVIWNKKRDLSTIKKTIGAHQVNIVKKVEKQKGGFYKETINSKANPEKLIPRKASLDPLKYGGYGSPLVAYTVIFIFEKGKQKKVTKGIEGITVMEQLRFEQDPREFLKTKGYEGVKQWLILPKYILFEAQGGYRRMIASHQETQKANSLILPENLVTLLYHARHYDEINHKVSFDYVNAHKEGFNDIFDFISDFGVRYILAPQHLEKIKVAYEKNKEVDLKEMIDAILSLLKFTLFGASVEFKFFDIKILKRYKSLTDIWEATIIYQSVTGLYERRVEVRKLWDGERL

SEQ ID NO: 195 - protein, 1375 aa, Streptococcus canis
MEKKYSIGLDIGTNSVGWAVITDDYKVPSKKFKVLGNTNRKSIKKNLMGALLFDSGETAEATRLKRTARRRYTRRKNRIRYLQEIFANEMAKLDDSFFQRLEESFLVEEDKKNERHPIFGNLADEVAYHRNYPTIYHLRKKLADSPEKADLRLIYLALAHIIKFRGHFLIEGKLNAENSDVAKLFYQLIQTYNQLFEESPLDEIEVDAKGILSARLSKSKRLEKLIAVFPNEKKNGLFGNIIALALGLTPNFKSNFDLTEDAKLQLSKDTYDDDLDELLGQIGDQYADLFSAAKNLSDAILLSDILRSNSEVTKAPLSASMVKRYDEHHQDLALLKTLVRQQFPEKYAEIFKDDTKNGYAGYVGIGIKHRKRTTKLATQEEFYKFIKPILEKMDGAEELLAKLNRDDLLRKQRTFDNGSIPHQIHLKELHAILRRQEEFYPFLKENREKIEKILTFRIPYYVGPLARGNSRFAWLTRKSEEAITPWNFEEVVDKGASAQSFIERMTNFDEQLPNKKVLPKHSLLYEYFTVYNELTKVKYVTERMRKPEFLSGEQKKAIVDLLFKTNRKVTVKQLKEDYFKKIECFDSVEIIGVEDRFNASLGTYHDLLKIIKDKDFLDNEENEDILEDIVLTLTLFEDREMIEERLKTYAHLFDDKVMKQLKRRHYTGWGRLSRKMINGIRDKQSGKTILDFLKSDGFSNRNFMQLIHDDSLTFKEEIEKAQVSGQGDSLHEQIADLAGSPAIKKGILQTVKIVDELVKVMGHKPENIVIEMARENQTTTKGLQQSRERKKRIEEGIKELESQILKENPVENTQLQNEKLYLYYLQNGRDMYVDQELDINRLSDYDVDHIVPQSFIKDDSIDNKVLTRSVENRGKSDNVPSEEVVKKMKNYWRQLLNAKLITQRKFDNLTKAERGGLSEADKAGFIKRQLVETRQITKHVARILDSRMNTKRDKNDKPIREVKVITLKSKLVSDFRKDFQLYKVRDINNYHHAHDAYLNAVVGTALIKKYPKLESEFVYGDYKVYDVRKMIAKSEQEIGKATAKRFFYSNIMNFFKTEVKLANGEIRKRPLIETNGETGEVVWNKEKDFATVRKVLAMPQVNIVKKTEVQTGGFSKESILSKRESAKLIPRKKGWDTRKYGGFGSPTVAYSILVVAKVEKGKAKKLKSVKVLVGITIMEKGSYEKDPIGFLEAKGYKDIKKELIFKLPKYSLFELENGRRRMLASATELQKANELVLPQHLVRLLYYTQNISATTGSNNLGYIEQHREEFKEIFEKIIDFSEKYILKNKVNSNLKSSFDEQFAVSDSILLSNSFVSLLKYTSFGASGGFTFLDLDVKQGRLRYQTVTEVLDATLIYQSITGLYETRTDLSQLGGD

SEQ ID NO: 196 - protein, 1375 aa, Streptococcus infantarius
MEKSYSIGLDIGTNSVGWAVITDDYKVPAKKMKVLGNTDKKYIKKNLLGALLFDSGETAEVTRLKRTARRRYTRRKNRLRYLQEIFAKEMTKVDESFFQRLEESFLTDDDKTFDSHPIFGNKAEEDAYHQKFPTIYHLRKYLADSQEKADLRLVYLALAHMIKYRGHFLIEGELNAENTDVQKLFNVFVETYDKIVDESHLSEIEVDASSILTEKVSKSRRLENLIKQYPTEKKNTLFGNLIALALGLQPNFKTNFKLSEDAKLQFSKDTYEEDLEELLGKVGDDYADLFISAKNLYDAILLSGILTVDDNSTKAPLSASMIKRYVEHHEDLEKLKEFIKINKLKLYHDIFKDKTKNGYAGYIDNGVKQDEFYKYLKTILTKIDDSDYFLDKIERDDFLRKQRTFDNGSIPHQIHLQEMHSILRRQGDYYPFLKENQAKIEKILTFRIPYYVGPLARKDSRFAWANYHSDEPITPWNFDEVVDKEKSAEKFITRMTLNDLYLPEEKVLPKHSHVYETFTVYNELTKIKYVNEQGESFFFDANMKQEIFDHVFKENRKVTKAKLLSYLNNEFEEFRINDLIGLDKDSKSFNASLGTYHDLKKILDKSFLDDKTNGQIIEDIVLTLTLFEDRDMIHERLQKYSDFFTSQQLKKLERRHYTGWGRLSYKLINGIRNKENNKTILDFLIDDGHANRNFMQLINDESLSFKTIIQEAQVVGDVDDIEAVVHDLPGSPAIKKGILQSVKIVDELVKVMGDNPDNIVIEMARENQTTGYGRNKSNQRLKRLQDSLKEFGSDILSKKKPSYVDSKVENSHLQNDRLFLYYIQNGKDMYTGEELDIDRLSDYDIDHIIPQAFIKDNSIDNKVLTSSAKNRGKSDDVPSIEIVRNRRSYWYKLYKSGLISKRKFDNLTKAERGGLTEADKAGFIKRQLVETRQITKHVAQILDARFNTKRDENDKVIRDVKVITLKSNLVSQFRKEFKFYKVREINDYHHAHDAYLNAVVGTALLKKYPKLTPEFVYGEYKKYDVRKLIAKSSDDYSEMGKATAKYFFYSNLMNFFKTEVKYADGRVFERPDIETNADGEVVWNKQKDFDIVRKVLSYPQVNIVKKVEAQTGGFSKESILSKGDSDKLIPRKTKKVYWNTKKYGGFDSPTVAYSVLVVADIEKGKAKKLKTVKELVGISIMERSFFEENPVSFLEKKGYHNVQEDKLIKLPKYSLFEFEGGRRRLLASATELQKGNEVMLPAHLVELLYHAHRIDSFNSTEHLKYVSEHKKEFEKVLSCVENFSNLYVDVEKNLSKVRAAAESMTNFSLEEISASFINLLTLTALGAPADFNFLGEKIPRKRYTSTKECLSATLIHQSVTGLYETRIDLSKLGEE

SEQ ID NO: 197 - protein, 1377 aa, Streptococcus equinus
MEKTYSIGLDIGTNSVGWAVITDDYKVPAKKMKVLGNTDKKYIKKNLLGALLFDSGETAEATRLKRAARRRYTRRKNRLRYLQEIFAKEMAKVDESFFQRLEESFLTDDDKTFDSHPIFGNKAEEDTYHQEFPTIYHLRKHLADSPEKVDLRLVYLALAHMIKFRGHFLIEGQLNAENTDVQKIFADFVGVYDRTFDDSHLSEITVDAASILTEKISKSRRLENLIKQYPTEKKNTLFGNLVALALGLQPNFKTNFKLSEDAKLQFSKDTYDEDLEELLGKIGDDYADLFTAAKNLYDAILLSGILTVDDNSTKAPLSASMIKRYEEHHEDLEKLKTFIKVNNFDKYHEIFKDKSKNGYAGYIENGVKQDIFYKHLKSIISEKNGGQYFLDKIEREDFLRKQRTFDNGSIPYQIHLQEMRTILRRQGEYYPFLKENQAKIEKILTFRIPYYVGPLARKNSRFAWAKYHSDEPITPWNFDEVVDKEKSAEKFITRMTLNDLYLPEEKVLPKHSYVYETFAVYNELTKIKYVNEQGKSFFFDANMKQEIFDHVFKENRKVTKAKLLSYLNNEFEEFRINDLIGLDKDSKSFNASLGTYHDLKKILDKSFLDDKTNEQIIEDIVLTLTLFEDRDMIHERLQKYSDIFTSQQLKKLERRHYTGWGRLSYKLINGIRNKENNKTILDFLIDDGDANRNFMQLINDDSLSFKTTIQEAQVVGDVDDIEAVVHDLPGSPAIKKGILQSVKIVDELVKVMGHNPQNIVIEMARENQITGYGRNRSNQRLKRLQDSLKEFGSDILSKKKPSYVDSKVENSHLQNDRLFLYYIQNGKDMYTGEELDIDHLSDYDIDHIIPQAFIKDNSIDNRVLTSSAKNRGKSDDVPSIEIVRNRKSYWYKLYKSGLISKRKFDNLTKAERGGLTETDKAGFIKRQLVETRQITKHVAQILDARFNTKCDENDKVIRDVKVITLKSSLVSQFRKEFKFYKVREINDYHHAHDAYLNAVVGTALLKKYPKLAPEFVYGEYKKYDVRKLVAKSSDNHSELGKATAKYFFYSNLMNFFKTEVKYADGRVFERPDIETNADGEVVWNKQRDFNIVRKVLSYPQVNIVKKVEVQTGGFSKESILPKGDSDKLIPRKTKKLQWETQKYGGFDSPTVAYSVLVVADVEKGKTRKLKTVKELVGISIMERSSFEENPVSFLEKKGYHNVQEDKLIKLPKYSLFEFEGGRRRLLASATELQKGNEVVLPQYMVNLLYHSQHVNNSHKPEHLNYVKQHKDEFKDIFNLIISIARINILKPKVVDNLINEFTEYGQEDISSLSESFINLLKFISFGAPGAFKFLKLDVKQSNLRYKSTTEALSATLIHQSVTGLYETRIDLSKLGEE

SEQ ID NO: 198 - protein, 1373 aa, Streptococcus oralis
MENKNYSIGLDIGTNSVGWAVITDDYKVPSKKMKVLGNTDKRFIKKNLIGALLFDEGTTAEARRLKRTARRRYTRRKNRLRYLQEIFAEEMSKVDSSFFHRLDDSFLIPEDKKGSKYPIFATLIEEKEYHKQFPTIYHLRKQLADSKEKTDLRLIYLALAHMIKYRGHFLYEDTFDIKNNDIQKIFNEFISIYNNTFEGNSLSGQNVQVEAIFTDKISKSAKRERVLKLFPDEKSTGLFSEFLKLIVGNQADFKKHFDLEEKAPLQFSRDTYDEDLENLLGQIGDDFADLFVAAKKLYDAILLSGILTVTDPSTKAPLSASMIERYENHQKDLATLKQFIKTNLPEKYDEVFSDQSKDGYAGYIDGKTTQESFYKYIKNLLSKFEGADYFLEKIEREDFLRKQRTFDNGSIPHQIHLQEMNAILRRQGEHYPFLKENKEKIEKILTFRIPYYVGPLARGNRDFAWLTRNSDQAIRPWNFEEIVDKASSAESFINKMTNYDLYLPEEKVLPKHSLLYETFAVYNELTKVKFIAEGLRDYQFLDSRQKKDIFYTLFKAEDKRKVTEKDIIQYLHTVDGYDGIELKGIEKQFNASLSTYHDLLKIIKDKEFMDDPNNEEILENIVHTLTIFEDREMIKQRLAQYDSLFDEKVIKALTRRHYTGWGKLSSKLINGIRDKQTGKTILDYLMDDGYNNRNFMQLINDDELSFKEIIKKAQVVGKTDDVKQVVQELPGSPAIKKGILQSIKLVDELVKVMGHEPESIVIEMARENQTTARGKKNSQQRYKRIEDSLKILASGLNAKILKEHPTDNIQLQNDRLFLYYLQNGRDMYTGKPLDINQLSSYDIDHIVPQAFIKDDSLDNRVLTSLKDNRGKSDNVPSLEVVEKMKTFWQQLLDSKLISYRKFNNLTKAERGGLDERDKVGFIKRQLVETRQITKHVAQILDARYNTEVNEKDKKNRTVKIITLKSNLVSNFRKEFRLYKIREINDYHHAHDAYLNAVVAKAILKKYPKLEPEFVYGDYQKYDLKRYISRSKDPKEIEKATEKYFFYSNLLNFFKEEVHYADGTIVKRENIEYSKDTGEIAWNKEKDFATIKKVLSLPQVNIVKKREVQTGGFSKESILPKGNSDKLIPRKTKDILWDTTKYGGFDSPVIAYSILLIADIEKGKAKRLKTVKTLVGITIMEKATFEKSPIAFLENKGYHNVRKENILCLPKYSLFELKNGRRRMLASAKELQKGNEIVLPVHLTTLLYHAKNIHRLDEPEHLEYIQKHRNEFKGLLNLVSEFSQKYVLADANLEKIKNLYADNEQADIEILANSFINLLTFTALGAPAAFKFFGKDVDRKRYTTVSEILNATLIHQSITGLYETRIDLSKLGED

SEQ ID NO: 199 - protein, 1371 aa, Unknown
  Streptococcus sp. F0441
MENKNYSIGLDIGTNSVGWSVITDDYKVPSKKMKVLGNTDKHFIKKNLIGALLFDEGTTAEARRLKRTARRRYTRRKNRLRYLQEIFSEEIGKVDSSFFHRLDDSFLIPEDKRGSKYPIFATLAEEKKYHKQFPTIYHLRKQLADSKEKTDLRLIYLALAHMIKYRGHFLYEEAFDIKNNDIQKIFNEFISIYNNTFEGNSLSGQNVQVEAIFTDKISKSAKRERVLKLFPDEKSTGLFSEFLKLIVGNQADFKKHFDLEEKAPLQFSRDTYDEDLENLLGQIGDDFADLFLVAKKLYDAILLSGILTVTNPSTKAPLSASMIERYENHQKDLASLKQFIKNNLPEKYDEVFSDQSEDGYAGYIDGKTTQETFYKYIKNLLSKFEGADYFLDKIEREDFLRKQRTFDNGSIPHQIHLQEMNAILRRQGEHYPFLKENKEKIEKILTFRIPYYVGPLARGNRDFAWLTRNSDQAIRPWNFEEIVDKASSAEDFINKMTNYDLYLPEEKVLPKHSLLYETFAVYNELTKVKFIAEGLRDYQFLDSGQKKQIVTQLFKEKRKVTEKDIIQFLHNVDGYDGIELKGIEKQFNASLSTYHDLLKIIKDKAFMDDAKNEAILENIVHTLTIFEDREMIKQRLAQYDSLFDEKVIKALTRRHYTGWGKLSAKLINGISDKQTGNTILDYLIDDGEINRNFMQLINDDGLSFKEIIQKAQVVGKTNDVKQVVQELPGSPAIKKGILQSIKIVDELVKVMGHAPESIVIEMARENQTTARGKKNSQQRYKRIEDSLKILASGLNSKILKEHPTDNIQLQNDRLFLYYLQNGKDMYTGEALDINQLSSCDIDHIIPQAFIKDDSLDNRVLTSSKDNRGKSDNVPSLEVVDKMKVFWQQLLDSKLISYRKFNNLTKAERGGLNELDKVGFIKRQLVETRQITKHVAQILDARFNKEVTEKDKKNRTVKIITLKSNLVSNFRKEFELYKVREINDYHHAHDAYLNAVVAKAILKKYPKLEPEFVYGDYQKYDLKRYISRSKDPKEIEKATEKYFFYSNLLNFFKEEVHYADGTIVKRENIEYSKDTGEIAWNKEKDFATIKKVLSLPQVNIVKKREVQTGGFSKESILPKGNSDKLIPRKTKDILWDTTKYGGFDSPVIAYSILLIADIEKGKAKKLKTVKTLVGITIMEKDAFEKNPIAFLENKGYHNVCKENILCLPKYSLFELENGRRRLLASAKELQKCNEIVLPVYLTTLLYHSKNVHKLDEPGHLEYIQKHRNEFKDLLNLVSEFSQKYVLADANLEKIKNLYADNEQADIEILANSFINLLTFTALGAPAAFKFFGKDVDRKRYTTVSEILNATLIHQSITGLYETRIDLSKLGED

SEQ ID NO: 200 - protein, 1371 aa, Streptococcus oralis
MENKNYSIGLDIGTNSVGWSVITDDYKVPSKKMKVLGNTDKRFIKKNLIGALLFDEGTTAEARRLKRTARRRYTRRKNRLRYLQEIFAEEMSKVDSSFFHRLDDSFLIPEDKRGSKYPIFATLAEEKEYHKQFPTIYHLRKQLADSKEKTDLRLIYLALAHMIKYRGHFLYEDTFDIKNNDIQKIFSEFISIYDNTFEGSSLSGQNAQVEAIFTDKISKSAKRERVLKLFPDEKSTGLFSEFLKLIVGNQADFKKHFDLGEKAPLQFSKDTYDEDLENLLGQIGDDFADLFLVAKKLYDAILLSGILTVTDPSTKAPLSASMIERYENHQKDLAVLKQFIKNNLPEKYDEVFSDQSKDGYAGYIDGKTTQEAFYKYIKNLLSKFEGTDYFLEKIEREDFLRKQRTFDNGSIPHQIHLQEMNAILRRQGEHYPFLKDNKEKIEKILTFRIPYYVGPLARGNRDFAWLTRNSDEAIRPWNFEEIVDKASSAEDFINKMTNYDLYLPEEKVLPKHSLLYETFAVYNELTKVKFIAEGLRDYQFLDSGQKKQIVTQLFKEKRKVTEKDIIQFLHNVDGYDGIELKGIEKQFNASLSTYHDLLKIIKDKEFMDDSKNEEILENIVHTLTIFEDREMIKQRLAQYDSLFDEKVIKALIRRHYTGWGKLSAKLIDGICDKQTGNTILDYLIDDGKNNRNFMQLINDDGLSFKEITQKAQVVGKTDDVKQVVQELPGSPAIKKGILQSIKIVDELVKVMGHTPESIVIEMARENQTTARGKKNSQQRYKRIEDALKNLASGLDSNILKEHPTNNIQLQNDRLFLYYLQNGRDMYTGKPLDINQLSSYDIDHIVPQAFIKDDSLDNRVLTSLKDNRGKSDNVPSIEVVQKRKAFWQQLLDSKLISERKFNNLTKAERGGLDERDKVGFIKRQLVETRQITKHVAQILDARFNKEVNEKDKKNRTVKIITLKSNLVSNFRKEFRLYKVREINDYHHAHDAYLNAVVAKAILKKYPKLEPEFVYGDYQKYDLKRYISRSRNPKEVEKATEKYFFYSNLLNFFKEEVHYADGTIVKRENIEYSKDTGEIAWNKEKDFATIKKVLSYPQVNIVKKREVQTGGFSKESILPKGNSDKLIPRKTKDILWETTKYGGFDSPVIAYSILLIADIEKGKAKKLKTVKTLVGITIMEKAAFEENPITFLENKGYHNVRKENILCLPKYSLFELENGRRRLLASAKELQKGNEIVLPVYLTTLLYHSKNVHKLDEPEHLEYIQKHRNEFKDLLNLVSEFSQKYVLADANLEKIQNLYADNEQADIEILANSFINLLTFTALGAPAAFKFFGKDIDRKRYTTVSEILNATLIHQSITGLYETRIDLSKLGED

SEQ ID NO: 201 - protein, 1330 aa, Unknown
  Enterococcus sp. AM1
MGKEYTIGLDIGTNSVGWAVLQEDLDLVRRKMKVYGNTEKNYLKKNFWGVDLFDEGMTAKDTRLKRTTRRRYFRRRQRISYLQTFFQEEMNRIDPNFFNRLDESFLIEEDKLSERHPIFGTIEEEVAYHKNYATIYHLRKELADAEEKADLRLVYLALAHIIKYRGHFLIEGRLSTENTSTEETFKTFLQKYNQTFNPVDETISIGSIFADKVSRAKKAEGVLALFPDEKRNGTFDQFLKMIVGNQGNFKKTFELEEDAKLQFSKEEYDESLEALLGEIGDEYADVFEAAKNVYNAVELSGILTVTDNSTKAKLSASMIKRYEDHKTDLKLFKEFIRKNLPEKYHEIFNDKNTDGYAGYIDNSKKTSQEKFYKYITNLIEKIDGAEYFLKKIENEDFLRKQRTFDNGIIPHQIHLEELKAILHHQAMYYPFLQEKFSNFVDLLTFRIPYYVGPLANGNSRFSWLSRKSDEPIRPWNLAEVVDLSKSAELFIERMTNFDLYLPSEKVLPKHSMLYEKYTVYNELTKVTYKDEQGKVQNFSSEEKERIFIDLFKQHRKVTKKDLSNFLRNEYNLDDVIIDGIENKFNASFNTYHDFLKLKIDPKVLDDPANEPMFEEIVKILTIFEDRKMLREQLSKFSDRLSEKTIKDLERRHYTGWGRLSAKLINGIHDKQSNKTILDYLINDDAPKKNINRNFMQLINDNRLTFKEEIEKEQLKANSEESLIEIVQNLAGSPAIKKGIFQSLKIVDELVEIMGYAPTNIVVEMARENQTTANGRRNSRPRLKNLEKAIDDLDSEILKKHPVDNKALQKDRLYLYYLQNGKDMYTNEELDIHKLSTYDIDHIIPQSFIVDNSLDNRVLVSSSKNRGKLDDVPSKEVVKKMRAFWESLYRSGLISKKKFDNLVKAESGGLSEDDKAGFIHRQLVETRQITKNVARILHQRFNSEKDEEGNLIRKVRIITLKSALTSQFRKNYGIYKIREINDYHHAHDAYLNGVVATALLKIYPQLEPEFVYGEFHRFNAFKENKATAKKQFYSNLMEFSKSDKVIIDENGEILWNQKKIVTVKKVMNYRQMNIVKKVEIQKGGFSKESILPKGDSDKLISRKKEWDTTKYGGFDSPNVAYSVVIRYEKGKTRKLVKTIVGITIMERAAFEKNEREFLKNKGYQNPQICMKLPKYSLYEFDDGRRRLLASAKEAQKGNQMVLPAHLVTFLYHAKHCNEKPDSLKYVTEHQSGFSEIMAHVKDFAEKYTLVDKNLEKILSLYAKNMDSEVKEIAQSFVDLMQLNAFGAPADFKFFGETIPRKRYTSVNELLEATIINQSITGLYETRRRLGD

SEQ ID NO: 202 - protein, 1345 aa, Streptococcus constellatus
MGKPYSIGLDIGTNSVGWAVVTDDYKVPAKKMKVLGNTDKQSIKKNLLGALLFDSGETAEATRLKRTARRRYTRRKNRLRYLQEIFTGEMNKVDENFFQRLDDSFLVDEDKRGEHHPIFGNIAAEVKYHDDFPTIYHLRRHLADTSKKADLRLVYLALAHMIKFRGHFLYEGDLKAENTDVQALFKDFVEEYDKTIEESHLSEITVDALSILTEKVSKSSRLENLIAHYPTEKKNTLFGNLIALSLDLHPNFKTNFQLSEDAKLQFSKDTYEEDLEGFLGEVGDEYADLFASAKNLYDAILLSGILTVDDNSTKAPLSASMVKRYEEHQKDLKKLKDFIKVNAPDQYNAIFKDKNKKGYASYIESGVKQDEFYKYLKGILLKINGSGDFLDKIDREDFLRKQRTFDNGSIPHQIHLQEMHAILRRQGEHYPFLKENQDKIEKILTFRIPYYVGPLARKGSRFAWAEYKADEKITPWNFDDILDKEKSAEKFITRMTLNDLYLPEEKVLPKHSPLYEAFTVYNELTKVKYVNEQGEAKFFDTNMKQEIFDHVFKENRKVTKDKLLNYLNKEFEEFRIVNLTGLDKENKAFNSSLGTYHDLRKILDKSFLDDKANEKTIEDIIQTLTLFEDREMIRQRLQKYSDIFTKAQLKKLERRHYTGWGRLSYKLINGIRNKENKKTILDYLIDDGYANRNFMQLINDDALSFKEEIARAQIIDDVDDIANVVHDLPGSPAIKKGILQSVKIVDELVKVMGHNPANIIIEMARENQTTDKGRRNSQQRLKLLQDSLKNLDNPVNIKNVENQQLQNDRLFLYYIQNGKDMYTGETLDINNLSQYDIDHIIPQAFIKDNSLDNRVLTRSDKNRGKSDDVPSIEVVHEMKSFWSKLLSVKLITQRKFDNLTKAERGGLTEEDKAGFIKRQLVETRQITKHVAQILDERFNTEFDGNKRRIRNVKIITLKSNLVSNFRKEFELYKVREINDYHHAHDAYLNAVVGNALLLKYPQLEPEFVYGEYPKYNSYRSRKSATEKFLFYSNILRFFKKEDIQTNEDGEIAWNKEKHIKILRKVLSYPQVNIVKKTEEQTGGFSKESILPKGESDKLIPRKTKNSYWDPKKYGGFDSPVVAYSILVFADVEKGKSKKLRKVQDMVGITIMEKKRFEKNPVDFLEQRGYRNVRLEKIIKLPKYSLFELENKRRRLLASAKELQKGNELVIPQRFTTLLYHSYRIEKDYEPEHREYVEKHKDEFKELLEYISVFSRKYVLADNNLTKIEMLFSKNKDAEVSSLAKSFISLLTFTAFGAPAAFNFFGENIDRKRYTSVTECLNATLIHQSITGLYETRIDLSKLGED

SEQ ID NO: 203 - protein, 1337 aa, Enterococcus faecalis
MKKDYVIGLDIGSNSVGWAVMTEDYQLVKKKMPIYGNTEKKKIKKNFWGVRLFEEGHTAEDRRLKRTARRRISRRRNRLRYLQAFFEEAMTDLDENFFARLQESFLVPEDKKWHRHPIFAKLEDEVAYHETYPTIYHLRKKLADSSEQADLRLIYLALAHIVKYRGHFLIEGKLSTENTSVKDQFQQFMVIYNQTFVNGESRLVSAPLPESVLIEEELTEKASRTKKSEKVLQQFPQEKANGLFGQFLKLMVGNKADFKKVFGLEEEAKITYASESYEEDLEGILAKVGDEYSDVFLAAKNVYDAVELSTILADSDKKSHAKLSSSMIVRFTEHQEDLKNFKRFIRENCPDEYDNLFKNEQKDGYAGYITHAGKVSQLKFYQYVKKIIQDIAGAEYFLEKIAQENFLRKQRTFDNGVIPHQIHLAELQAIIHRQAAYYPFLKENQEKIEQLVTFRIPYYVGPLSKGDASTFAWLKRQSEEPIRPWNLQETVDLDQSATAFIERMTNFDTYLPSEKVLPKHSLLYEKFMVFNELTKISYTDDRGIKANFSGKEKEKIFDYLFKTRRKVKKKDIIQFYRNEYNTEIVTLSGLEEDQFNASFSTYQDLLKCGLTRAELDHPDNAEKLEDIIKILTIFEDRQRIRTQLSTFKGQFSAEVLKKLERKHYTGWGRLSKKLINGIYDKESGKTILDYLIKDDGVSKHYNRNFMQLINDSQLSFKNAIQKAQSSEHEETLSETVNELAGSPAIKKGIYQSLKIVDELVAIMGYAPKRIVVEMARENQTTSTGKRRSIQRLKIVEKAMAEIGSNLLKEQPTTNEQLRDTRLFLYYMQNGKDMYTGDELSLHRLSHYDIDHIIPQSFMKDDSLDNLVLVGSTENRGKSDDVPSKEVVKDMKAYWEKLYAAGLISQRKFQRLTKGEQGGLTLEDKAHFIQRQLVETRQITKNVAGILDQLYNAKSKEKKVQIITLKASLTSQFRSIFGLYKVREVNDYHHGQDAYLNCVVATTLLKVYPNLAPEFVYGEYPKFQTFKENKATAKTIIYTNLMRFFTEDEPRFTKDGEILWSNSYLKTIKKELNYHQMNIVKKVEVQKGGFSKESIKPKGPSNKLIPVKNGLDPQKYGGFDSPVVAYTVLFTHEKGKKPLIKQEILGITIMEKTRFEQNPILFLEEKGFLRPRVLMKLPKYTLYEFPEGRRRLLASAKEAQKGNQMVLPEHLLTLLYHAKQCLLPNQSESLAYVEQHQPEFQEILERVVDFAEVHTLAKSKVQQIVKLFEANQTADVKEIAASFIQLMQFNAMGAPSTFKFFQKDIERARYTSIKEIFDATIIYQSTTGLYETRRKVVD

SEQ ID NO: 204 - protein, 1337 aa, Enterococcus faecalis
MKKDYVIGLDIGTNSVGWAVMTEDYQLVKKKMPIYGNTEKKKIKKNFWGVRLFEEGHTAEDRRLKRTARRRISRRRNRLRYLQAFFEEAMTALDENFFARLQESFLVPEDKKWHRHPIFAKLEDEVAYHETYPTIYHLRKKLADSSEQADLRLIYLALAHIVKYRGHFLIEGKLSTENISVKDQFQQFMVIYNQTFVNGESRLVSAPLPESVLIEEELTEKASRTKKSEKVLQQFPQEKANGLFGQFLKLMVGNKADFKKVFGLEEEAKITYASESYEEDLEGILAKVGDEYSDVFLAAKNVYDAVELSTILADSDKKSHAKLSSSMIVRFTEHQEDLKNFKRFIRENCPDEYDNLFKNEQKDGYAGYIAHAGKVSQLKFYQYVKKIIQDIAGAEYFLEKIAQENFLRKQRTFDNGVIPHQIHLAELQAIIHRQAAYYPFLKENQKKIEQLVTFRIPYYVGPLSKGDASTFAWLKRQSEEPIRPWNLQETVDLDQSATAFIERMTNFDTYLPSEKVLPKHSLLYEKFMVFNELTKISYTDDRGIKANFSGKEKEKIFDYLFKTRRKVKKKDIIQFYRNEYNTEIVTLSGLEEDQFNASFSTYQDLLKCGLTRAELDHPDNAEKLEDIIKILTIFEDRQRIRTQLSTFKGQFSAEVLKKLERKHYTGWGRLSKKLINGIYDKESGKTILDYLIKDDGVSKHYNRNFMQLINDSQLSFKNAIQKAQSSEHEETLSETVNELAGSPAIKKGIYQSLKIVDELVAIMGYAPKRIVVEMARENQTTSTGKRRSIQRLKIVEKAMAEIGSNLLKEQPTTNEQLRDTRLFLYYMQNGKDMYTGDELSLHRLSHYDIDHIIPQSFMKDDSLDNLVLVGSTENRGKSDDVPSKEVVKKMKAYWEKLYAAGLISQRKFQRLTKGEQGGLTLEDKAHFIQRQLVETRQITKNVAGILDQRYNAKSKEKKVQIITLKASLTSQFRSIFGLYKVREVNDYHHGQDAYLNCVVATTLLKVYPNLAPEFVYGEYPKFQAFKENKAMAKAIIYTNLLRFFTEDEPRFTKDGEILWSNSYLKTIKKELNYHQMNIVKKVEVQKGGFSKESIKPKGPSNKLIPVKNGLDPQKYGGFDSPVVAYTVLFTHEKGKKPLIKQEILGITIMEKTRFEQNPILFLEEKGFLRPRVLMKLPKYTLYEFPEGRRRLLASAKEAQKGNQMVLPERLLTLLYHAKQCLLPNQSESLAYVEQHQPEFQEILERVVDFAEVHTLAKSKVQQIVKLFEANQTADVKEIAASFIQLMQFNAMGAPSTFKFFQKDIERARYTSIKEIFDATIIYQSTTGLYETRRKVVD

SEQ ID NO: 205 - protein, 1337 aa, Enterococcus faecalis
MKKDYVIGLDIGTNSVGWAVMTEDYQLVKKKMPIYGNTEKKKIKKNFWGVRLFEEGHTAEDRRLKRTARRRISRRRNRLRYLQAFFEEAMTALDENFFARLQESFLVPEDKKWHRHPIFAKLEDEVAYHETYPTIYHLRKKLADSSEQADLRLIYLALAHIVKYRGHFLIEGKLSTENISVKEKFQQFMIIYNQTFVNGEGRLVSAPLPESVLIEEELTEKASRTKKSEKVLQQFPQEKANGLFGQFLKLMVGNKADFKKVFGLEEEAKITYASESYEEDLEGILAKVGDEYSDVFLAAKNVYDAVELSTILADSDKKSYAKLSSSMIVRFTEHQEDLKKFKRFIRENCPDEYDNLFKNEQKDGYAGYIAHAGKVSQLKFYQYVKKIIQDIAGAEYFLEKIAQENFLRKQRTFDNGVIPHQIHLAELQAIIHRQAAYYPFLKENQEKIEQLVTFRIPYYVGPLSKGDASTFAWLKRQSEEPIRPWNLQETVDLDQSATAFIERMTNFDTYLPSEKVLPKHSLLYEKFMVFNELTKISYTDDRGIKANFSGKEKEKIFDYLFKTRRKVKKKDIIQFYRNEYNTEIVTLSGLEEDQFNASFSTYQDLLKCGLTRAELDHPDNAEKLEDIIKILTIFEDRQRIRTQLSTFKGQFSAEVLKKLERKHYTGWGRLSKKLINGIYDKESGKTILDYLVKDDGVSKHYNRNFMQLINDSQLSFKNAIQKAQSSEHEETLSETVNELAGSPAIKKGIYQSLKIVDELVAIMGYAPKRIVVEMARENQTTSTGKRRSIQRLKIVEKAMAEIGSNLLKEQPTTNEQLRDTRLFLYYMQNGKDMYTGDELSLHRLSHYDIDHIIPQSFMKDDSLDNLVLVGSTENRGKSDDVPSKEVVKDMKAYWEKLYAAGLISQRKFQRLTKGEQGGLTLEDKAHFIQRQLVETRQITKNVAGILDQRYNAKSKEKKVQIITLKASLTSQFRSIFGLYKVREVNDYHHGQDAYLNCVVATTLLKVYPNLAPEFVYGEYPKFQTFKENKATAKAIIYTNLLRFFTEDEPRFTKDGEILWSNSYLKTIKKELNYHQMNIVKKVEVQKGGFSKESIKPKGPSNKLIPVKNGLDPQKYGGFDSPIVAYTVLFTHEKGKKPLIKQEILGITIMEKTRFEQNPILFLEEKGFLRPRVLMKLPKYTLYEFPEGRRRLLASAKEAQKGNQMVLPEHLLTLLYHAKQCLLPNQSESLAYVEQHQPEFQEILERVVDFAEVHTLAKSKVQQIVKLFEANQTADVKEIAASFIQLMQFNAMGAPSTFKFFQKDIERARYTSIKEIFDATIIYQSTTGLYETRRKVVD

SEQ ID NO: 206 - protein, 1337 aa, Enterococcus faecalis
MKKDYVIGLDIGTNSVGWAVMTEDYQLVKKKMPIYGNTEKKKIKKNFWGVRLFEEGHTAEDRRLKRTARRRISRRRNRLRYLQAFFEEAMTALDENFFARLQESFLVPEDKKWHRHPIFAKLEDEVAYHETYPTIYHLRKKLADSSEQADLRLIYLALAHIVKYRGHFLIEGKLSTENISVKEQFQQFMIIYNQTFVNGESRLVSAPLPESVLIEEELTEKASRTKKSEKVLQQFPQEKANGLFGQFLKLMVGNKADFKKVFGLEEEAKITYASESYEEDLEGILAKVGDEYSDVFLAAKNVYDAVELSTILADSDKKSHAKLSSSMIVRFTEHQEDLKNFKRFIRENCPDEYDNLFKNEQKDGYAGYITHAGKVSQLKFYQYVKKIIQDIAGAEYFLEKIAQENFLRKQRTFDNGVIPHQIHLAELQAIIHRQAAYYPFLKENQEKIEQLVTFRIPYYVGPLSKGDANTFAWLKRQSEEPIRPWNLQETVDLDQSATAFIERMTNFDTYLPSEKVLPKHSLLYEKFMVFNELTKISYTDDRGIKANFSGKEKEKIFDYLFKTRRKVKKKDIIQFYRNEYNTEIVTLSGLEEDQFNASFSTYQDLLKCGLTRAELDHPDNAEKLEDIIKILTIFEDRQRIRTQLSTFKGQFSAEVLKKLERKHYTGWGRLSKKLINGIYDKESGKTILDYLIKDDGVSKHYNRNFMQLINDSQLSFKNAIQKAQSSEHEETLSETVNELAGSPAIKKGIYQSLKIVDELVAIMGYAPKRIVVEMARENQTTSTGKRRSIQRLKIVEKAMAEIGSNLLKEQPTTNEQLRDTRLFLYYMQNGKDMYTGDELSLHRLSHYDIDHIIPQSFMKDDSLDNLVLVGSTENRGKSDDVPSKEVVKDMKAYWEKLYAAGLISQRKFQRLTKGEQGGLTLEDKAHFIQRQLVETRQITKNVAGILDQRYNAKSKEKKVQIITLKASLTSQFRSIFGLYKVREVNDYHHGQDAYLNCVVATTLLKVYPNLAPEFVYGEYPKFQTFKENKATAKAIIYTNLLRFFTEDEPRFTKDGEILWSNSYLKTIKKELNYHQMNIVKKVEVQKGGFSKESIKPKGPSNKLIPVKNGLDPQKYGGFDSPIVAYTVLFTHEKGKKPLIKQEILGITIMEKTRFEQNPILFLEEKGFLRPRVLMKLPKYTLYQFPEGRRRLLASAKEAQKGNQMVLPEHLLTLLYHAKQCLLPNQSESLAYVEQHQPEFQEILERVVDFAEVHTLAKSKVQQIVKLFEANQTADVKEIAASFIQLMQFNAMGAPSTFKFFQKDIERARYTSIKEIFDATIIYQSTTGLYETRRKVVD

SEQ ID NO: 207 - protein, 1339 aa, Enterococcus faecalis
MKKDYVIGLDIGTNSVGWAVMTEDYQLVKKKMPIYGNTEKKKIKKNFWGVRLFEEGHTAEDRRLKRTARRRISRRRNRLRYLQAFFEEAMTALDENFFARLQESFLVPEDKKWHRHPIFAKLEDEVAYHETYPTIYHLRKKLADSSEQADLRLIYLALAHIVKYRGHFLIEGKLSTENISVKEQFQQFMIIYNQTFVNGESRLVSAPLPESVLIEEELTEKASRTKKSEKVLQQFPQEKANGLFGQFLKLMVGNKADFKKVFGLEEEAKIKITYASESYEEDLEGILAKVGDEYSDVFLAAKNVYDAVELSTILADSDKKSHAKLSSSMIVRFTEHQEDLKNFKRFIRENCPDEYDNLFKNEQKDGYAGYIAHAGKVSQLKFYQYVKKIIQDIAGAEYFLEKIAQENFLRKQRTFDNGVIPHQIHLAELQAIIHRQAAYYPFLKENQKKIEQLVTFRIPYYVGPLSKGDASTFAWLKRQSEEPIRPWNLQETVDLDQSATAFIERMTNFDTYLPSEKVLPKHSLLYEKFMVFNELTKISYTDDRGIKANFSGKEKEKIFDYLFKTRRKVKKKDIIQFYRNEYNTEIVTLSGLEEDQFNASFSTYQDLLKCGLTRAELDHPDNAEKLEDIIKILTIFEDRQRIRTQLSTFKGQFSEEVLKKLERKHYTGWGRLSKKLINGIYDKESGKTILDYLIKDDGVSKHYNRNFMQLINDSQLSFKNAIQKAQSSEHEETLSETVNELAGSPAIKKGIYQSLKIVDELVAIMGYAPKRIVVEMARENQTTSTGKRRSIQRLKIVEKAMAEIGSNLLKEQPTTNEQLRDTRLFLYYMQNGKDMYTGDELSLHRLSHYDIDHIIPQSFMKDDSLDNLVLVGSTENRGKSDDVPSKEVVKKMKAYWEKLYAAGLISQRKFQRLTKGEQGGLTLEDKAHFIQRQLVETRQITKNVAGILDQRYNAKSKEKKVQIITLKASLTSQFRSIFGLYKVREVNDYHHGQDAYLNCVVATTLLKVYPNLAPEFVYGEYPKFQAFKENKATAKAIIYTNLLRFFTEDEPRFTKDGEILWSNSYLKTIKKELNYHQMNIVKKVEVQKGGFSKESIKPKGPSNKLIPVKNGLDPQKYGGFDSPVVAYTVLFTHEKGKKPLIKQEILGITIMEKTRFEQNPILFLEEKGFLRPRVLMKLPKYTLYEFPEGRRRLLASAKEAQKGNQMVLPEHLLTLLYHAKQCLLPNQSESLAYVEQHQPEFQEILERVVDFAEVHTLAKSKVQQIVKLFEANQTADVKEIAASFIQLMQFNAMGAPSTFKFFQKDIERARYTSIKEIFDATIIYQSTTGLYETRRKVVD

SEQ ID NO: 208 - protein, 1337 aa, Enterococcus faecalis
MKKDYVIGLDIGTNSVGWAVMTEDYQLVKKKMPIYGNTEKKKIKKNFWGVRLFEEGHTAEDRRLKRTARRRISRRRNRLRYLQAFFEEAMTALDENFFARLQESFLVPEDKKWHRHPIFAKLEDEVAYHETYPTIYHLRKKLADSSEQADLRLIYLALAHIVKYRGHFLIEGKLSTENISVKEQFQQFMIIYNQTFVNGESRLVSAPLPESVLIEEELTEKASRTKKSEKVLQQFPQEKANGLFGQFLKLMVGNKADFKKVFGLEEEAKITYASESYEEDLEGILAKVGDEYSDVFLAAKNVYDAVELSTILADSDKKSHAKLSSSMIVRFTEHQEDLKKFKRFIRENCPDEYDNLFKNEQKDGYAGYIAHAGKVSQLKFYQYVKKIIQDIAGAEYFLEKIAQENFLRKQRTFDNGVIPHQIHLAELQAIIHRQAAYYPFLKENQEKIEQLVTFRIPYYVGPLSKGDASTFAWLKRQSEEPIRPWNLQETVDLDQSATAFIERMTNFDTYLPSEKVLPKHSLLYEKFMVFNELTKISYTDDRGIKANFSGKEKEKIFDYLFKTRRKVKKKDIIQFYRNEYNTEIVTLSGLEEDQFNASFSTYQDLLKCGLTRAELDHPDNAEKLEDIIKILTIFEDRQRIRTQLSTFKGQFSAEVLKKLERKHYTGWGRLSKKLINGIYDKESGKTILGYLIKDDGVSKHYNRNFMQLINDSQLSFKNAIQKAQSSEHEETLSETVNELAGSPAIKKGIYQSLKIVDELVAIMGYAPKRIVVEMARENQTTSTGKRRSIQRLKIVEKAMAEIGSNLLKEQPTTNEQLRDTRLFLYYMQNGKDMYTGDELSLHRLSHYDIDHIIPQSFMKDDSLDNLVLVGSTENRGKSDDVPSKEVVKDMKAYWEKLYAAGLISQRKFQRLTKGEQGGLTLEDKAHFIQRQLVETRQITKNVAGILDQRYNAKSKEKKVQIITLKASLTSQFRSIFGLYKVREVNDYHHGQDAYLNCVVATTLLKVYPNLAPEFVYGEYPKFQTFKENKATAKAIIYTNLLRFFTEDEPRFTKDGEILWSNSYLKTIKKELNYHQMNIVKKVEVQKGGFSKESIKPKGPSNKLIPVKNGLDPQKYGGFDSPIVAYTVLFTHEKGKKPLIKQEILGITIMEKTRFEQNPILFLEEKGFLRPRVLMKLPKYTLYEFPEGRRRLLASAKEAQKGNQMVLPEHLLTLLYHAKQCLLPNQSESLAYVEQHQPEFQEILERVVDFAEVHTLAKSKVQQIVKLFEANQTADVKEIAASFIQLMQFNAMGAPSTFKFFQKDIERARYTSIKEIFDATIIYQSTTGLYETRRKVVD

SEQ ID NO: 209 - protein, 1337 aa, Enterococcus faecalis
MKKDYVIGLDIGTNSVGWAVMTEDYQLVKKKMPIYGNTEKKKIKKNFWGVRLFEEGHTAEDRRLKRTARRRISRRRNRLRYLQAFFEEAMTALDENFFARLQESFLVPEDKKWHRHPIFAKLEDEVAYHETYPTIYHLRKKLADSSEQADLRLIYLALAHIVKYRGHFLIEGKLSTENISVKEQFQQFMIIYNQTFVNGESRLVSAPLPESVLIEEELTEKASRTKKSEKVLQQFPQEKANGLFGQFLKLMVGNKADFKKVFGLEEEAKITYASESYEEDLEGILAKVGDEYSDVFLAAKNVYDAVELSTILADSDKKSHAKLSSSMIVRFTEHQEDLKKFKRFIRENCPDEYDNLFKNEQKDGYAGYIAHAGKVSQLKFYQYVKKIIQDIAGAEYFLEKIAQENFLRKQRTFDNGVIPHQIHLAELQAIIHRQAAYYPFLKENQEKIEQLVTFRIPYYVGPLSKGDASTFAWLKRQNEKPIRPWNLQETVDLDQSATAFIERMTNFDTYLPSEKVLPKHSLLYEKFMVFNELTKISYTDDRGIKANFSGKEKEKIFDYLFKTRRKVKKKDIIQFYRNEYNTEIVTLSGLEEDQFNASFSTYQDLLKCGLTRAELDHPDNAEKLEDIIKILTIFEDRQRIRTQLSTFKGQFSAEVLKKLERKHYTGWGRLSKKLINGIYDKESGKTILDYLIKDDGVSKHYNRNFMQLINDSQLSFKNAIQKAQSSEHEETLSETVNELAGSPAIKKGIYQSLKIVDELVAIMGYAPKRIVVEMARENQTTSTGKRRSIQRLKIVEKAMAEIGSNLLKEQPTTNEQLRDTRLFLYYMQNGKDMYTGDELSLHRLSHYDIDHIIPQSFMKDDSLDNLVLVGSTENRGKSDDVPSKEVVKKMKAYWEKLYAAGLISQRKFQRLTKGEQGGLTLEDKAHFIQRQLVETRQITKNVAGILDQRYNAKSKEKKVQIITLKASLTSQFRSIFGLYKVREVNDYHHGQDAYLNCVVATTLLKVYPNLAPEFVYGEYPKFQAFKENKATAKAIIYTNLMRFFTEVEPRFTKDGEILWSNSYLKTIKKELNYHQMNIVKKVEVQKGGFSKESIKPKGPSNKLIPVKNGLDPQKYGGFDSPVVAYTVLFTHEKGKKPLIKQEILGITIMEKTKFEQNPILFLEEKGFLRPRVLMKLPKYTLYEFPEGRRRLLASAKEAQKGNQMVLPEHLLTLLYHAKQCLLPNQSESLAYVEQHQPEFQEILERVVDFAEVHTLAKSKVQQIVKLFETNQTADVKEIAASFIQLMQFNAMGAPSTFKFFQKDIERARYTSIKEIFDATIIYQSTTGLYETRRKVVD

SEQ ID NO: 210 - protein, 1337 aa, Enterococcus faecalis
MKKDYVIGLDIGTNSVGWAVMTEDYQLVKKKMPIYGNTEKKKIKKNFWGVRLFEEGHTAEDRRLKRTARRRISRRRNRLRYLQAFFEEAMTALDENFFARLQESFLVPEDKKWHRHPIFAKLEDEVAYHETYPTIYHLRKKLADSSEQADLRLIYLALAHIVKYRGHFLIEGKLSTENISVKEQFQQFMIIYNQTFVNGESRLVSAPLPESVLIEEELTEKASRTKKSEKVLQQFPQEKANGLFGQFLKLMVGNKADFKKVFGLEEEAKITYASESYEEDLEGILAKVGDEYSDVFLAAKNVYDAVELSTILADSDKKSHAKLSSSMIVRFTEHQEDLKNFKRFIRENCPDEYDNLFKNEQKDGYAGYIAHAGKVSQLKFYQYVKKIIQDIAGAEYFLEKIAQENFLRKQRTFDNGVIPHQIHLAELQAIIHRQAAYYPFLKENQKKIEQLVTFRIPYYVGPLSKGDASTFAWLKRQSEEPIRPWNLQETVDLDQSATAFIERMTNFDTYLPSEKVLPKHSLLYEKFMVFNELTKISYTDDRGIKANFSGKEKEKIFDYLFKTRRKVKKKDIIQFYRNEYNTEIVTLSGLEEDQFNASFSTYQDLLKCGLTRAELDHPDNAEKLEDIIKILTIFEDRQRIRTQLSTFKGQFSEEVLKKLERKHYTGWGRLSKKLINGIYDKESGKTILDYLIKDDGVSKHYNRNFMQLINDSQLSFKNAIQKAQSSEHEETLSETVNELAGSPAIKKGIYQSLKIVDELVAIMGYAPKRIVVEMARENQTTSTGKRRSIQRLKIVEKAMAEIGSNLLKEQPTTNEQLRDTRLFLYYMQNGKDMYTGDELSLHRLSHYDIDHIIPQSFMKDDSLDNLVLVGSTENRGKSDDVPSKEVVKKMKAYWEKLYAAGLISQRKFQRLTKGEQGGLTLEDKAHFIQRQLVETRQITKNVAGILDQRYNAKSKEKKVQIITLKASLTSQFRSIFGLYKVREVNDYHHGQDAYLNCVVATTLLKVYPNLAPEFVYGEYPKFQAFKENKATAKAIIYTNLLRFFTEDEPRFTKDGEILWSNSYLKTIKKELNYHQMNIVKKVEVQKGGFSKESIKPKGPSNKLIPVKNGLDPQKYGGFDSPVVAYTVLFTHEKGKKPLIKQEILGITIMEKTRFEQNPILFLEEKGFLRPRVLMKLPKYTLYEFPEGRRRLLASAKEAQKGNQMVLPEHLLTLLYHAKQCLLPNQSESLAYVEQHQPEFQEILERVVDFAEVHTLAKSKVQQIVKLFEANQTADVKEIAASFIQLMQFNAMGAPSTFKFFQKDIERARYTSIKEIFDATIIYQSTTGLYETRRKVVD

SEQ ID NO: 211 - protein, 1337 aa, Enterococcus faecalis
MKKDYVIGLDIGTNSVGWAVMTEDYQLVKKKMPIYGNTEKKKIKKNFWGVRLFEEGHTAEDRRLKRTARRRISRRRNRLRYLQAFFEEAMTALDENFFARLQESFLVPEDKKWHRHPIFAKLEDEVAYHETYPTIYHLRKKLADSSEQADLRLIYLALAHIVKYRGHFLIEGKLSTENISVKEQFQQFMIIYNQTFVNGESRLVSTPLPESVLIEEELTEKASRTKKSEKVLQQFPQEKANGLFGQFLKLMVGNKADFKKVFGLEEEAKITYASESYEEDLEGILAKVGDEYSDVFLAAKNVYDAVELSTILADSDKKSHAKLSSSMIVRFTEHQEDLKNFKRFIRENCPDEYDNLFKNEQKDGYAGYITHAGKVSQLKFYQYVKKIIQDIAGAEYFLEKIAQENFLRKQRTFDNGVIPHQIHLAELQAIIHRQAAYYPFLKENQEKIEQLVTFRIPYYVGPLSKGDASTFAWLKRQSEEPIRPWNLQETVDLDQSATAFIERMTNFDTYLPSEKVLPKHSLLYEKFMVFNELTKISYTDDRGIKANFSGKEKEKIFDYLFKTRRKVKKKDIIQFYRNEYNTEIVTLSGLEEDQFNASFSTYQDLLKCGLTRAELDHPDNAEKLEDIIKILTIFEDRQRIRTQLSTFKGQFSAEVLKKLERKHYTGWGRLSKKLINGIYDKESGKTILDYLVKDDGVSKHYNRNFMQLINDSQLSFKNAIQKAQSSEHEETLSETVNELAGSPAIKKGIYQSLKIVDELVAIMGYAPKRIVVEMARENQTTSTGKRRSIQRLKIVEKAMAEIGSNLLKEQPTTNEQLRDTRLFLYYMQNGKDMYTGDELSLHRLSHYDIDHIIPQSFMKDDSLDNLVLVGSTENRGKSDDVPSKEVVKDMKAYWEKLYAAGLISQRKFQRLTKGEQGGLTLEDKAHFIQRQLVETRQITKNVAGILDQRYNAKSKEKKVQIITLKASLTSQFRSIFGLYKVREVNDYHHGQDAYLNCVVATTLLKVYPNLAPEFVYGEYPKFQTFKENKATAKAIIYTNLLRFFTEDEPRFTKDGEILWSNSYLKTIKKELNYHQMNIVKKVEVQKGGFSKESIKPKGPSNKLIPVKNGLDPQKYGGFDSPIVAYTVLFTHEKGKKPLIKQEILGITIMEKTRFEQNPILFLEEKGFLRPRVLMKLPKYTLYEFPEGRRRLLASAKEAQKGNQMVLPEHLLTLLYHAKQCLLPNQSESLAYVEQHQPEFQEILERVVDFAEVHTLAKSKVQQIVKLFEANQTADVKEIAASFIQLMQFNAMGAPSTFKFFQKDIERARYTSIKEIFDATIIYQSTTGLYETRRKVVD

SEQ ID NO: 212 - protein, 1337 aa, Unknown
  Enterococcus - multispecies
MKKDYVIGLDIGTNSVGWAVMTEDYQLVKKKMPIYGNTEKKKIKKNFWGVRLFEEGHTAEDRRLKRTARRRISRRRNRLRYLQAFFEEAMTDLDENFFARLQESFLVPEDKKWHRHPIFAKLEDEVAYHETYPTIYHLRKKLADSSEQADLRLIYLALAHIVKYRGHFLIEGKLSTENISVKEQFQQFMIIYNQTFVNGESRLVSAPLPESVLIEEELTEKASRTKKSEKVLQQFPQEKANGLFGQFLKLMVGNKADFKKVFGLEEEAKITYASESYEEDLEGILAKVGDEYSDVFLAAKNVYDAVELSTILADSDKKSHAKLSSSMIVRFTEHQEDLKKFKRFIRENCPDEYDNLFKNEQKDGYAGYIAHAGKVSQLKFYQYVKKIIQDIAGAEYFLEKIAQENFLRKQRTFDNGVIPHQIHLAELQAIIHRQAAYYPFLKENQEKIEQLVTFRIPYYVGPLSKGDASTFAWLKRQSEEPIRPWNLQETVDLDQSATAFIERMTNFDTYLPSEKVLPKHSLLYEKFMVFNELTKISYTDDRGIKANFSGKEKEKIFDYLFKTRRKVKKKDIIQFYRNEYNTEIVTLSGLEEDQFNASFSTYQDLLKCGLTRAELDHPDNAEKLEDIIKILTIFEDRQRIRTQLSTFKGQFSAEVLKKLERKHYTGWGRLSKKLINGIYDKESGKTILGYLIKDDGVSKHYNRNFMQLINDSQLSFKNAIQKAQSSEHEETLSETVNELAGSPAIKKGIYQSLKIVDELVAIMGYAPKRIVVEMARENQTTSTGKRRSIQRLKIVEKAMAEIGSNLLKEQPTTNEQLRDTRLFLYYMQNGKDMYTGDELSLHRLSHYDIDHIIPQSFMKDDSLDNLVLVGSTENRGKSDDVPSKEVVKDMKAYWEKLYAAGLISQRKFQRLTKGEQGGLTLEDKAHFIQRQLVETRQITKNVAGILDQRYNANSKEKKVQIITLKASLTSQFRSIFGLYKVREVNDYHHGQDAYLNCVVATTLLKVYPNLAPEFVYGEYPKFQTFKENKATAKAIIYTNLLRFFTEDEPRFTKDGEILWSNSYLKTIKKELNYHQMNIVKKVEVQKGGFSKESIKPKGPSNKLIPVKNGLDPQKYGGFDSPIVAYTVLFTHEKGKKPLIKQEILGITIMEKTRFEQNPILFLEEKGFLRPRVLMKLPKYTLYEFPEGRRRLLASAKEAQKGNQMVLPEHLLTLLYHAKQCLLPNQSESLAYVEQHQPEFQEILERVVDFAEVHTLAKSKVQQIVKLFEANQTADVKEIAASFIQLMQFNAMGAPSTFKFFQKDIERARYTSIKEIFDATIIYQSTTGLYETRRKVVD

SEQ ID NO: 213 - protein, 1337 aa, Enterococcus faecalis
MKKDYVIGLDIGTNSVGWAVMTEDYQLVKKKMPIYGNTEKKKIKKNFWGVRLFEEGHTAEDRRLKRTARRRISRRRNRLRYLQAFFEEAMTDLDENFFARLQESFLVPEDKKWHRHPIFAKLEDEVAYHETYPTIYHLRKKLADSSEQADLRLIYLALAHIVKYRGHFLIEGKLSTENISVKEQFQQFMIIYNQTFVNGESRLVSAPLPESVLIEEELTEKASRTKKSEKVLQQFPQEKANGLFGQFLKLMVGNKADFKKVFGLEEEAKITYASESYEEDLEGILAKVGDEYSDVFLAAKNVYDAVELSTILADSDKKSHAKLSSSMIVRFTEHQEDLKKFKRFIRENCPDEYDNLFKNEQKDGYAGYIAHAGKVSQLKFYQYVKKIIQDIAGAEYFLEKIAQENFLRKQRTFDNGVIPHQIHLAELQAIIHRQAAYYPFLKENQEKIEQLVTFRIPYYVGPLSKGDASTFAWLKRQSEEPIRPWNLQETVDLDQSATAFIERMTNFDTYLPSEKVLPKHSLLYEKFMVFNELTKISYTDDRGIKANFSGKEKEKIFDYLFKTRRKVKKKDIIQFYRNEYNTEIVTLSGLEEDQFNASFSTYQDLLKCGLTRAELDHPDNAEKLEDIIKILTIFEDRQRIRTQLSTFKGQFSAEVLKKLERKHYTGWGRLSKKLINGIYDKESGKTILDYLVKDDGVSKHYNRNFMQLINDSQLSFKNAIQKAQSSEHEETLSETVNELAGSPAIKKGIYQSLKIVDELVAIMGYAPKRIVVEMARENQTTSTGKRRSIQRLKIVEKAMAEIGSNLLKEQPTTNEQLRDTRLFLYYMQNGKDMYTGDELSLHRLSHYDIDHIIPQSFMKDDSLDNLVLVGSTENRGKSDDVPSKEVVKDMKAYWEKLYAAGLISQRKFQRLTKGEQGGLTLEDKAHFIQRQLVETRQITKNVAGILNQRYNANSKEKKVQIITLKASLTSQFRSIFGLYKVREVNDYHHGQDAYLNCVVATTLLKVYPNLAPEFVYGEYPKFQTFKENKATAKAIIYTNLLRFFTEDEPRFTKDGEILWSNSYLKTIKKELNYHQMNIVKKVEVQKGGFSKESIKPKGPSNKLIPVKNGLDPQKYGGFDSPVVAYTVLFTHEKGKKPLIKQEILGITIMEKTRFEQNPILFLEEKGFLRPRVLMKLPKYTLYEFPEGRRRLLASAKEAQKGNQMVLPEHLLTLLYHAKQCLLPNQSESLAYVEQHQPEFQEILERVVDFAEVHTLAKSKVQQIVKLFEANQTADVKEIAASFIQLMQFNAMGAPSTFKFFQKDIERARYTSIKEIFDATIIYQSTTGLYETRRKVVD

SEQ ID NO: 214 - protein, 1337 aa, Enterococcus faecalis
MKKDYVIGLDIGTNSVGWAVMTEDYQLVKKKMPIYGNTEKKKIKKNFWGVRLFEEGHTAEDRRLKRTARRRISRRRNRLRYLQAFFEEAMTDLDENFFARLQESFLVPEDKKWHRHPIFAKLEDEVAYHETYPTIYHLRKKLADSSEQADLRLIYLALAHIVKYRGHFLIEGKLSTENTSVKEQFQQFMVIYNQTFVNGESRLVSAPLPESVLIEEELTEKASRTKKSEKVLQQFPQEKANGLFGQFLKLMVGNKADFKKVFGLEEEAKITYASESYEEDLEGILAKVGDEYSDVFLAAKNVYDAVELSTILADSDKKSHAKLSSSMIVRFTEHQEDLKKFKRFIRENCPDEYDNLFKNEQKDGYAGYIAHAGKVSQLKFYQYVKKIIQDIAGAEYFLEKIAQENFLRKQRTFDNGVIPHQIHLAELQAIIHRQAAYYPFLKENQEKIEQLVTFRIPYYVGPLSKGDASTFAWLKRQSEEPIRPWNLQETVDLDQSATAFIERMTNFDTYLPSEKVLPKHSLLYEKFMVFNELTKISYTDDRGIKANFSGKEKEKIFDYLFKTRRKVKKKDIIQFYRNEYNTEIVTLSGLEEDQFNASFSTYQDLLKCGLTRAELDHPDNAEKLEDIIKILTIFEDRQRIRTQLSTFKGQFSAEVLKKLERKHYTGWGRLSKKLINGIYDKESGKTILDYLVKDDGVSKHYNRNFMQLINDSQLSFKNAIQKAQSSEHEETLSETVNELAGSPAIKKGIYQSLKIVDELVAIMGYAPKRIVVEMARENQTTSTGKRRSIQRLKIVEKAMAEIGSNLLKEQPTTNEQLRDTRLFLYYMQNGKDMYTGDELSLHRLSHYDIDHIIPQSFMKDDSLDNLVLVGSTENRGKSDDVPSKKVVKKMKAYWEKLYAAGLISQRKFQRLTKGEQGGLTLEDKAHFIQRQLVETRQITKNVAGILDQRYNAKSKEKKVQIITLKASLTSQFRSIFGLYKVREVNDYHHGQDAYLNCVVATTLLKVYPNLAPEFVYGEYPKFQAFKENKATAKTIIYTNLMRFFTEDEPRFTKDSEILWSNSYLKTIKKELNYHQMNIVKKVEVQKGGFSKESIKPKGPSNKLIPVKNGLDPQKYGGFDSPVVAYTVLFTHEKGKKPLIKQEILGITIMEKTRFEQNPILFLEEKGFLRPRVLMKLPKYTLYEFPEGRRRLLASAKEAQKGNQMVLPEHLLTLLYHAKQCLLPNQSESLAYVEQHQPEFQEILERVVDFAEVHTLAKSKVQQIVKLFEANQTADVKEIAASFIQLMQFNAMGAPSTFKFFQKDIERARYTSIKEIFDATIIYQSTTGLYETRRKVVD

SEQ ID NO: 215 - protein, 1334 aa, Enterococcus phoeniculicola
MKKEYTIGLDIGTNSVGWAVLTENYDLVKKKMKVYGNTETKYLKKNLWGVRLFDEGETAADRRLKRTTRRRYSRRRNRICRLQDLFTEEMNQVDANFFHRLQESFLVPDEKEFERHAIFGKMEEEVSYYREFPTIYHLRKHLADTSEQADLRLVYLALAHIVKYRGHFLIEGELNTENSSVSETFRTFIQVYNQIFRENEVPLAVPDNIEELFSEKVSRARKVEAILSVYSEEKSTGTLAQFLKLMVGNQGRFKKTFDLEEDGIIQIPKEEYEEELETLLAIIGDEYAEIFSATKSVYDAVALSGILSVTDGDTKAKLSASMVERYEAHQKDLVQFKQFIRKELPEMYAPIFRDNSVSGYAGYVENSKVVTQAEFYKYIKKAIEKVPGAEYFLEKIEQETFLDKQRTFNNGVIPHQIHLEELEAIIQKQATYYPFLADNKEEMKQLVTFRIPYYVGPLADGNSPFAWLERISSEPIRPGNLAEVVDIKKSATKFIERMTNFDTYLPTEKVLPKHSMIYEKYMVYNELTKVSYVDERGMNQRFSGEEKKQIVEELFKQSRKVTKKLLEKFLSNEFGLVDVAIKGIETSFNAGYGTYHDFLKIGITREQLDKEENSETLEEIVKILTVFEDRKMIREQLKKYTYLFDEEVLKKLERRHYTGWGRLSAKLLIGIKEKRTHKTILDYLIEDDGGKQPINRNLMQLINDSDLSFKSEIAEAQSDMNTEDLHEVVQNLAGSPAIKKGILQSLKIVDELVDIMGSLPKNIVVEMARENQTTSRGRTNSNPRMKALEEAMRNLRSNLLKEYPTDNQALQNDRLYLYYLQNGKDMYTGLDLSLHNLSSYDIDHIVPQSFTTDNSLDNRVLVSSKENRGKKDDVPSKEVVQKNITLWETLKNSNLISQKKYDNLTKGLRGGLTEDDRAHFIKRQLVETRQITKHVARILDQRFNSQKDEEGKTIRAVRVVTLKSSLTSQFRKQFAIHKVREINDYHHGHDAYLNGVVANSLLRVYPQLQPEFVYGDYPKFNAYKANKATAKKQLYTNIMKFFAEDAVIIDENGEILWDKKNIATVKKVMSYPQMNIVKKPEIQTGSFSKETIKPKGDSDKLISRKTNWSPKLYGGFDSPQVAYSVIITYEKGKKKVRAKAIVGITIMEQSLFKKDPVSLLEEKGYANPEVLIHLPKYTLYELENGRRRLLASANEAQKGNQLVLPASLVTLLYHAKQVDEDSGKSEEYVREHRAEFAEILNYVQAFSETKILANKNLQTILKLYEENKEADIKEIAESFVNLMKFSAYGAPMDFKFFGKTIPRSRYTSVGELLSATIINQSITGLYETRRKLVD

SEQ ID NO: 216 - protein, 1339 aa, Enterococcus faecium
MKKEYTIGLDIGTNSVGWSVLTDDYRLVSKKMKVAGNTEKSSTKKNFWGVRLFDEGQTAEARRSKRTARRRLARRRQRILELQKIFAPEILKIDEHFFARLNESFLVLDEKKQSRHPVFATIKQEKSYHQTYPTIYHLRQALADSSEKADIRLVYLAMAHLLKYRGHFLIEGELNTENSSVTETFRQFLSTYNQQFSEADDKQTEKLDEAVDCSFVFTEKMSKTKKAETLLKYFPHEKSNGYLSQFIKLMVGNQGNFKNVFGLEEAKLQFSKETYEEDLEELLEKIGDDYIDLFVQAKNVYDAVLLSEILSDSTKNTRAKLSAGMIRRYDAHKEDLVLLKRFVKENLPKKYRAFFGDNSVNGYAGYIEGHATQEDFYKFVKKELTGIRGSEVFLTKIEQENFLRKQRTFDNGVIPHQIHLTELRAIIANQKKHYPFLKEEQEKLESLLTFKIPYYVGPLAKKQENSPFAWLIRKSEEKIKPWNLPEIVDMEGSAVRFIERMINTDMYMPHNKVLPKNSLLYQKFSIYNELTKVRYQDERGQMNYFSSIEKKEIFHELFEKNRKVTKKDLQEFLYLKYDIKHAELSGIEKAFNASYTTYHDFLTMSENKREMKQWLEDPELASMFEEIIKTLTVFEDREMIKTRLSHHEATLGKHIIKKLTKKHYTGWGRLSKELIQGIRDKQSNKTILDYLINDDDFPHHRNRNFMQLINDDSLSFKKEIKKAQMITDTENLEEIVKELTGSPAIKKGILQSLKIVDEIVGIMGYEPANIVVEMARENQTTGRGLKSSRPRLKALEESLKDFGSQLLKEYPTDNSSLQKDRLYLYYLQNGRDMYTGAPLDIHRLSDYDIDHIIPRSFTTDNSIDNKVLVSSKENRLKKDDVPSEKVVKKMRSFWYDLYSSKLISKRKLDNLTKIKLTEEDKAGFIKRQLVETRQITKHVAGILHHRFNKAEDTNEPIRKVRIITLKSALVSQFRNRFGIYKVREINEYHHAHDAYLNGVVALALLKKYPQLAPEFVYGEYLKFNAHKANKATVKKEFYSNIMKFFESDTPVCDENGEIFWDKSKSIAQVKKVINHHHMNIVKKTEIQKGGFSKETVEPKKDSSKLLPRKNNWDPAKYGGLGSPNVAYTVAFTYEKGKARKRTNALEGITIMEREAFEQSPVLFLKNKGYEQAEIEMKLPKYALFELENGRKRMVASNKEAQKANSFLLPEHLVTLLYHAKQYDEISHKESFDYVNEHHKEFSEVFARVLEFAGKYTLAEKNIEKLEKIYKENQTDDLAKLASSFVNLMQFNAMGAPADFKFFDVTIPRKRYTSLTEIWQSTIIHQSITGLYETRIRMGK

SEQ ID NO: 217 - protein, 1340 aa, Enterococcus faecium
MKKEYTIGLDIGTNSVGWSVLTDDYRLVSKKMKVAGNTEKSSTKKNFWGVRLFDEGQTAEARRSKRTARRRLARRRQRILELQKIFAPEILKIDEHFFARLNESFLVLDEKKQSRHPVFATIKQEKSYHQTYPTIYHLRQALADSSEKADIRLVYLAMAHLLKYRGHFLIEGELNTENSSVTETFRQFLSTYNQQFSEADDKQTEKLDEAVDCSFVFTEKMSKTKKAETLLKYFPHEKSNGYLSQFIKLMVGNQGNFKNVFGLEEEAKLQFSKETYEEDLEELLEKIGDDYIDLFVQAKNVYDAVLLSEILSDSTKNTRAKLSAGMIRRYDAHKEDLVLLKRFVKENLPKKYRAFFGDNSVNGYAGYIEGHATQEDFYKFVKKELTGIRGSEVFLTKIEQENFLRKQRTFDNGVIPHQIHLTELRAIIANQKKHYPFLKEEQEKLESLLTFKIPYYVGPLAKKQENSPFAWLIRKSEEKIKPWNLPEIVDMEGSAVRFIERMNNTDMYIPHNKVLPKNSLLYQKFSIYNELTKVRYQDERGQMNYFSSIEKKEIFHELFEKNRKVTKKDLQEFLYLKYDIKHAELSGIEKAFNASYTTYHDFLTMSENKREMKQWLEDPELASMFEEIIKTLTVFEDREMIKTRLSHHEATLGKHIIKKLTKKHYTGWGRLSKELIQGIRDKQSNKTILDYLINDDDFPHHRNRNFMQLINDDSLSFKKEIKKAQMITDTENLEEIVKELTGSPAIKKGILQSLKIVDEIVGIMGYEPANIVVEMARENQTTGRGLKSSRPRLKALEESLKDFGSQLLKEYPTDNSSLQKDRLYLYYLQNGRDMYTGAPLDIHRLSDYDIDHIIPRSFTTDNSIDNKVLVSSKENRLKKDDVPSEKVVKKMRSFWYDLYSSKLISKRKLDNLTKIKLTEEDKAGFIKRQLVETRQITKHVAGILHHRFNKAEDTNEPIRKVRIITLKSALVSQFRNRFGIYKVREINEYHHAHDAYLNGVVALALLKKYPQLAPEFVYGEYLKFNAHKANKATVKKEFYSNIMKFFESDTPVCDENGEIFWDKSKSIAQVKKVINHHHMNIVKKTEIQKGGFSKETVEPKKDSSKLLPRKNNWDPAKYGGLGSPNVAYTVAFTYEKGKARKRTNALEGITIMEREAFEQSPVLFLKNKGYEQAEIEMKLPKYALFELENGRKRMVASNKEAQKANSFLLPEHLVTLLYHAKQYDEISHKESFDYVNEHHKEFSEVFARVLEFAGKYTLAEKNIEKLEKIYKENQTDDLAKLASSFVNLMQFNAMGAPADFKFFDVTIPRKRYTSLTEIWQSTIIHQSITGLYETRIRMGK

SEQ ID NO: 218 - protein, 1340 aa, Enterococcus faecium
MKKEYTIGLDIGTNSVGWSVLTDDYRLVSKKMKVAGNTEKSSTKKNFWGVRLFDEGQTAEARRSKRTARRRLARRRQRILELQKIFAPEILKIDEHFFARLNESFLVLDEKKQSRHPVFATIKQEKSYHQTYPTIYHLRQALADSSEKADIRLVYLAMAHLLKYRGHFLIEGELNTENSSVTETFRQFLSTYNQQFSEADDKQTEKLDEAVDCSFVFTEKMSKTKKAETLLKYFPHEKSNGYLSQFIKLMVGNQGNFKNVFGLEEEAKLQFSKETYEEDLEELLEKIGDDYIDLFVQAKNVYDAVLLSEILSDSTKNTRAKLSAGMIRRYDAHKEDLVLLKRFVKENLPKKYRAFFGDNSVNGYAGYIEGHATQEDFYKFVKKELTGIRGSEVFLTKIEQENFLRKQRTFDNGVIPHQIHLTELRAIIANQKKHYPFLKEEQEKLESLLTFKIPYYVGPLAKKQENSPFAWLIRKSEEKIKPWNLPEIVDMEGSAVRFIERMINTDMYIPHNKVLPKNSLLYQKFSIYNELTKVRYQDERGQMNYFSSIEKKEIFHELFEKNRKVTKKDLQEFLYLKYDIKHAELSGIEKAFNASYTTYHDFLTMSENKREMKQWLEDPELASMFEEIIKTLTVFEDREMIKTRLSHHEATLGKHIIKKLTKKHYTGWGRLSKELIQGIRDKQSNKTILDYLINDDDFPHHRNRNFMQLINDDSLSFKKEIKKAQMITDTENLEEIVKELTGSPAIKKGILQSLKIVDEIVGIMGYEPANIVVEMARENQTTGRGLKSSRPRLKALEESLKDFGSQLLKEYPTDNSSLQKDRLYLYYLQNGRDMYTGAPLDIHRLSDYDIDHIIPRSFTTDNSIDNKVLVSSKENRLKKDDVPSEKVVKKMRSFWYDLYSSKLISKRKLDNLTKIKLTEEDKAGFIKRQLVETRQITKHVAGILHHRFNKAEDTNEPIRKVRIITLKSALVSQFRNRFGIYKVREINEYHHAHDAYLNGVVALALLKKYPQLAPEFVYGEYLKFNAHKANKATVKKEFYSNIMKFFESDTPVCDENGEIFWDKSKSIAQVKKVINHHHMNIVKKTEIQKGGFSKETVEPKKDSSKLLPRKNNWDPAKYGGLGSPNVAYTVAFTYEKGKARKRTNALEGITIMEREAFEQSPVLFLKNKGYEQAEIEMKLPKYALFELENGRKRMVASNKEAQKANSFLLPEHLVTLLYHAKQYDEISHKESFDYVNEHHKEFSEVFARVLEFAGKYTLAEKNIEKLEKIYKENQTDDLAKLASSFVNLMQFNAMGAPADFKFFDVTIPRKRYTSLTEIWQSTIIHQSITGLYETRIRMGK

SEQ ID NO: 219 - protein, 1339 aa, Enterococcus faecium
MKKEYTIGLDIGTNSVGWSVLTDDYRLVSKKMKVAGNTEKSSTKKNFWGVRLFDEGQTAEARRSKRTARRRLARRRQRILELQKIFAPEILKIDEHFFARLNESFLVLDEKKQSRHPVFATIKQEKSYHQTYPTIYHLRQALADSSEKADIRLVYLAMAHLLKYRGHFLIEGELNTENSSVTETFRQFLSTYNQQFSEADDKQTEKLDEAVDCSFVFTEKMSKTKKAETLLKYFPHEKSNGYLSQFIKLMVGNQGNFKNVFGLEEAKLQFSKETYEEDLEELLEKIGDDYIDLFVQAKNVYDAVLLSEILSDSTKNTRAKLSAGMIRRYDAHKEDLVLLKRFVKENLPKKYRAFFGDNSVNGYAGYIEGHATQEDFYKFVKKELTGIRGSEVFLTKIEQENFLRKQRTFDNGVIPHQIHLTELRAIIANQKKHYPFLKEEQEKLESLLTFKIPYYVGPLAKKQENSPFAWLIRKSEEKIKPWNLPEIVDMEGSAVRFIERMINTDMYIPHNKVLPKNSLLYQKFSIYNELTKVRYQDERGQMNYFSSIEKKEIFHELFEKNRKVTKKDLQEFLYLKYDIKHAELSGIEKAFNASYTTYHDFLTMSENKREMKQWLEDPELASMFEEIIKTLTVFEDREMIKTRLSHHEATLGKHIIKKLTKKHYTGWGRLSKELIQGIRDKQSNKTILDYLINDDDFPHHRNRNFMQLINDDSLSFKKEIKKAQMITDTENLEEIVKELTGSPAIKKGILQSLKIVDEIVGIMGYEPANIVVEMARENQTTGRGLKSSRPRLKALEESLKDFGSQLLKEYPTDNSSLQKDRLYLYYLQNGRDMYTGAPLDIHRLSDYDIDHIIPRSFTTDNSIDNKVLVSSKENRLKKDDVPSEKVVKKMRSFWYDLYSSKLISKRKLDNLTKIKLTEEDKAGFIKRQLVETRQITKHVAGILHHRFNKAEDTNEPIRKVRIITLKSALVSQFRNRFGIYKVREINEYHHAHDAYLNGVVALALLKKYPQLAPEFVYGEYLKFNAHKANKATVKKEFYSNIMKFFESDTPVCDENGEIFWDKSKSIAQVKKVINHHHMNIVKKTEIQKGGFSEETVEPKKDSSKLLPRKNNWDPAKYGGLGSPNVAYTVAFTYEKGKARKRTNALEGITIMEREAFEQSPVLFLKNKGYEQAEIEMKLPKYALFELENGRKRMVASNKEAQKANSFLLPEHLVTLLYHAKQYDEISHKESFDYVNEHHKEFSEVFARVLEFAGKYTLAEKNIEKLEKIYKENQTDDLAKLASSFVNLMQFNAMGAPADFKFFDVTIPRKRYTSLTEIWQSTIIHQSITGLYETRIRMGK

SEQ ID NO: 220 - protein, 1340 aa, Enterococcus faecium
MKKEYTIGLDIGTNSVGWSVLTDDYRLVSKKMKVAGNTEKSSTKKNFWGVRLFDEGQTAEARRSKRTARRRLARRRQRILELQKIFAPEILKIDEHFFARLNESFLVLDEKKQSRHPVFATIKQEKSYHQTYPTIYHLRQALADSSEKADIRLVYLAMAHLLKYRGHFLIEGELNTENSSVTETFRQFLSTYNQQFSEADDKQTEKLDEAVDCSFVFTEKMSKTKKAETLLKYFPHEKSNGYLSQFIKLMVGNQGNFKNVFGLEEEAKLQFSKETYEEDLEELLEKIGDDYIDLFVQAKNVYDAVLLSEILSDSTKNTRAKLSAGMIRRYDAHKEDLVLLKRFVKENLPKKYRAFFGDNSVNGYAGYIEGHATQEDFYKFVKKELTGIRGSEVFLTKIEQENFLRKQRTFDNGVIPHQIHLTELRAIIANQKKHYPFLKEEQEKLESLLTFKIPYYVGPLAKKQENSPFAWLIRKSEEKIKPWNLPEIVDMEGSAVRFIERMINTDMYMPHNKVLPKNSLLYQKFSIYNELTKVRYQDERGQMNYFSSIEKKEIFHELFEKNRKVTKKDLQEFLYLKYDIKHAELSGIEKAFNASYTTYHDFLTMSENKREMKQWLEDPELASMFEEIIKTLTVFEDREMIKTRLSHHEATLGKHIIKKLTKKHYTGWGRLSKELIQGIRDKQSNKTILDYLINDDDFPHHRNRNFMQLINDDSLSFKKEIKKAQMITDTENLEEIVKELTGSPAIKKGILQSLKIVDEIVGIMGYEPANIVVEMARENQTTGRGLKSSRPRLKALEESLKDFGSQLLKEYPTDNSSLQKDRLYLYYLQNGRDMYTGAPLDIHRLSDYDIDHIIPRSFTTDNSIDNKVLVSSKENRLKKDDVPSEKVVKKMRSFWYDLYSSKLISKRKLDNLTKIKLTEEDKAGFIKRQLVETRQITKHVAGILHHRFNKAEDTNEPIRKVRIITLKSALVSQFRNRFGIYKVREINEYHHAHDAYLNGVVALALLKKYPQLAPEFVYGEYLKFNAHKANKATVKKEFYSNIMKFFESDTPVCDENGEIFWDKSKSIAQVKKVINHHHMNIVKKTEIQKGGFSKETVEPKKDSSKLLPRKNNWDPAKYGGLGSPNVAYTVAFTYEKGKARKRTNALEGITIMEREAFEQSPVLFLKNKGYEQAEIEMKLPKYALFELENGRKRMVASNKEAQKANSFLLPEHLVTLLYHAKQYDEISHKESFDYVNEHHKEFSEVFARVLEFAGKYTLAEKNIEKLEKIYKENQTDDLAKLASSFVNLMQFNAMGAPADFKFFDVTIPRKRYTSLTEIWQSTIIHQSITGLYETRIRMGK

SEQ ID NO: 221 - protein, 1340 aa, Enterococcus faecium
MKKEYTIGLDIGTNSVGWSVLTDDYRLVSKKMKVAGNTEKSSTKKNFWGVRLFDEGQTAEARRSKRTARRRLARRRQRILELQKIFAPEILKIDEHFFARLNESFLVLDEKKQSRHPVFATIKQEKSYHQTYPTIYHLRQALADSSEKADIRLVYLAMAHLLKYRGHFLIEGELNTENSSVTETFRQFLSTYNQQFSEADDKQTEKLDEAVDCSFVFTEKMSKTKKAETLLKYFPHEKSNGYLSQFIKLMVGNQGNFKNVFGLEEEAKLQFSKETYEEDLEELLEKIGDDYIDLFVQAKNVYDAVLLSEILSDSTKNTRAKLSAGMIRRYDAHKEDLVLLKRFVKENLPKKYRAFFGDNSVNGYAGYIEGHATQEDFYKFVKKELTGIRGSEVFLTKIEQENFLRKQRTFDNGVIPHQIHLTELRAIIANQKKHYPFLKEEQEKLESLLTFKIPYYVGPLAKKQENSPFAWLIRKSEEKIKPWNLPEIVDMEGSAVRFIERMINTDMYIPHNKVLPKNSLLYQKFSIYNELTKVRYQDERGQMNYFSSIEKKEIFHELFEKNRKVTKKDLQEFLYLKYDIKHAELSGIEKAFNASYTTYHDFLTMSENKREMKQWLEDPELASMFEEIIKTLTVFEDREMIKTRLSHHEATLGKHIIKKLTKKHYTGWGRLSKELIQGIRDKQSNKTILDYLINDDDFPHHRNRNCMQLINDDSLSFKKEIKKAQMITDTENLEEIVKELTGSPAIKKGILQSLKIVDEIVGIMGYEPANIVVEMARENQTTGRGLKSSRPRLKALEESLKDFGSQLLKEYPTDNSSLQKDRLYLYYLQNGRDMYTGAPLDIHRLSDYDIDHIIPRSFTTDNSIDNKVLVSSKENRLKKDDVPSEKVVKKMRSFWYDLYSSKLISKRKLDNLTKIKLTEEDKAGFIKRQLVETRQITKHVAGILHHRFNKAEDTNEPIRKVRIITLKSALVSQFRNRFGIYKVREINEYHHAHDAYLNGVVALALLKKYPQLAPEFVYGEYLKFNAHKANKATVKKEFYSNIMKFFESDTPVCDENGEIFWDKSKSIAQVKKVINHHHMNIVKKTEIQKGGFSKETVEPKKDSSKLLPRKNNWDPTKYGGLGSPNVAYTVAFTYEKGKARKRTNALEGITIMEREAFEQSPVLFLKNKGYEQAEIEMKLPKYALFELENGRKRMVASNKEAQKANSFLLPEHLVTLLYHAKQYDEISHKESFDYVNEHHKEFSEVFARVLEFAGKYTLAEKNIEKLEKIYKENQTDDLAKLASSFVNLMQFNAMGAPADFKFFDVTIPRKRYTSLTEIWQSTIIHQSITGLYETRIRMGK

SEQ ID NO: 222 - protein, 1340 aa, Enterococcus faecium
MKKEYTIGLDIGTNSVGWSVLTDDYRLVSKKMKVAGNTEKSSTKKNFWGVRLFDEGQTAEARRSKRTARRRLARRRQRILELQKIFAPEILKIDEHFFARLNESFLVLDEKKQSRHPVFATIKQEKSYHQTYPTIYHLRQALADSSEKADIRLVYLAMAHLLKYRGHFLIEGELNTENSSVTETFRQFLSTYNQQFSEADDKQTEKLDEAVDCSFVFTEKMSKTKKAETLLKYFPHEKSNGYLSQFIKLMVGNQGNFKNVFGLEEEAKLQFSKETYEEDLEELLEKIGDDYIDLFVQAKNVYDAVLLSEILSDSTKNTRAKLSAGMIRRYDAHKEDLVLLKRFVKENLPKKYRAFFGDNSVNGYAGYIEGHATQEDFYKFVKKELTGIRGSEVFLTKIEQENFLRKQRTFDNGVIPHQIHLTELRAIIANQKKHYPFLKEEQEKLESLLTFKIPYYVGPLAKKQENSPFAWLIRKSEEKIKPWNLPEIVDMEGSAVRFIERMINTDMYMPHNKVLPKNSLLYQKFSIYNELTKVRYQDERGQMNYFSSIEKKEIFHELFEKNRKVTKKDLQEFLYLKYDIKHAELSGIEKAFNASYTTYHDFLTMSENKREMEQWLEDPELASMFEEIIKTLTVFEDREMIKTRLSHHEATLGKHIIKKLTKKHYTGWGRLSKELIQGIRDKQSNKTILDYLINDDDFPHHRNRNFMQLINDDSLSFKKEIKKAQMITDTENLEEIVKELTGSPAIKKGILQSLKIVDEIVGIMGYEPANIVVEMARENQTTGRGLKSSRPRLKALEESLKDFGSQLLKEYPTDNSSLQKDRLYLYYLQNGRDMYTGAPLDIHRLSDYDIDHIIPRSFTTDNSIDNKVLVSSKENRLKKDDVPSEKVVKKMRSFWYDLYSSKLISKRKLDNLTKIKLTEEDKAGFIKRQLVETRQITKHVAGILHHRFNKAEDTNEPIRKVRIITLKSALVSQFRNRFGIYKVREINEYHHAHDAYLNGVIALALLKKYPQLAPEFVYGEYLKFNAHKANKATVKKEFYSNIMKFFESDTPVCDENGEIFWDKSKSIAQVKKVINHHHMNIVKKTEIQKGGFSKETVEPKKDSSKLLPRKNNWDPAKYGGLGSPNVAYTVAFTYEKGKARKRTNALEGITIMEREAFEQSPVLFLKNKGYEQAEIEMKLPKYALFELENGRKRMVASNKEAQKANSFLLPEHLVTLLYHAKQYDEISHKESFDYVNEHHKEFSEVFARVLEFAGKYTLAEKNIEKLEKIYKENQTDDLAKLASSFVNLMQFNAMGAPADFKFFDVTIPRKRYTSLTEIWQSTIIHQSITGLYETRIRMGK

SEQ ID NO: 223 - protein, 1340 aa, Enterococcus faecium
MKKEYTIGLDIGTNSVGWSVLTDDYRLVSKKMKVAGNTEKSSTKKNFWGVRLFDEGQTAEARRSKRTARRRLARRRQRILELQKIFAPEILKIDEHFFARLNESFLVPDEKKQSRHPVFATIKQEKSYHQTYPTIYHLRQALADSSEKADIRLVYLAMAHLLKYRGHFLIEGELNTENSSVTETFRQFLSTYNQQFSEAGDKQTEKLDEAVDCSFVFTEKMSKTKKAETLLKYFPHEKSNGYLSQFIKLMVGNQGNFKNVFGLEEEAKLQFSKETYEEDLEELLEKIGDDYIDLFVQAKNVYDAVLLSEILSDSTKNTRAKLSAGMIRRYDAHKEDLVLLKRFVKENLPKKYRAFFGDNSVNGYAGYIEGHATQEAFYKFVKKELTGIRGSEVFLTKIEQENFLRKQRTFDNGVIPHQIHLSELRAIIANQKKHYPFLKEEQEKLESLLTFKIPYYVGPLAKKQENSPFAWLIRKSEEKIKPWNLPEIVDMEGSAVRFIERMINTDMYMPHNKVLPKNSLLYQKFSIYNELTKVRYQDERGQMNYFSSIEKKEIFHELFEKNRKVTKKDLQEFLYLKYDIKHAELSGIEKAFNASYTTYHDFLTMSENKREMKQWLEDPELASMFEEIIKTLTVFEDREMIKTRLSHHEATLGKHIIKKLTKKHYTGWGRLSKELIQGIRDKQSNKTILDYLINDDDFPHHRNRNFMQLINDDSLSFKKEIKKAQMITDTENLEEIVKELTGSPAIKKGILQSLKIVDEIVGIMGYEPANIVVEMARENQTTGRGLKSSRPRLKALEESLKDFGSQLLKEYPTDNSSLQKDRLYLYYLQNGRDMYTGAPLDIHRLSDYDIDHIIPRSFTTDNSIDNKVLVSSKENRLKKDDVPSEKVVKKMRSFWYDLYSSKLISKRKLDNLTKIKLTEEDKAGFIKRQLVETRQITKHVAGILHHRFNKAEDTNDPIRKVRIITLKSALVSQFRNRFGIYKVREINEYHHAHDAYLNGVVALALLKKYPQLAPEFVYGEYLKFNAHKANKATVKKEFYSNIMKFFESDTPVCDENGEIFWDKSKSIAQVKKVINHHHMNIVKKTEIQKGGFSKETVEPKKDSSKLLPRKNNWDPAKYGGLGSPNVAYTVAFTYEKGKARKRTNALEGITIMEREAFEQSPVLFLKNKGYEQAEIEMKLPKYALFELENGRKRMVASNKEAQKANSFLLPEHLVTLLYHAKQYDEISHKESFDYVNEHHKEFSEVFARVLEFAGKYTLAEKNIEKLEKIYKENQTDDLAKLASSFVNLMQFNAMGAPADFKFFDVTIPRKRYTSLTEIWQSTIIHQSITGLYETRIRMGK

SEQ ID NO: 224 - protein, 1370 aa, Streptococcus mitis
MKKGYSIGLDIGTNSVGFAVITDDYKVPSKKMKVLGNTDKRFIKKNLIGALLFDEGTTAEARRLKRTARRRYTRRKNRLRYLQEIFSEEMSKVDSSFFHRLDDSFLIPEDKRESKYPIFATLTEEKEYHKQFPTIYHLRKQLADSKEKTDLRLIYLALAHMIKYRGHFLYEEAFDIKNNDIQKIFNEFISIYDNTFEGSSLSGQNAQVEAIFTDKISKSAKRERVLKLFPDEKSTGLFSEFLKLIVGNQADFKKHFDLEDKAPLQFSKDTYDEDLENLLGQIGDDFTDLFVSAKKLYDAILLSGILTVTDPSTKAPLSASMIERYENHQNDLAALKQFIKNNLPEKYDEVFSDQSKDGYAGYIDGKTTQETFYKYIKNLLSKFEGTDYFLDKIEREDFLRKQRTFDNGSIPHQIHLQEMNAILRRQGEYYPFLKDNKEKIEKILTFRIPYYVGPLARGNRDFAWLTRNSDEAIRPWNFEEIVDKASSAEDFINKMTNYDLYLPEEKVLPKHSLLYETFAVYNELTKVKFIAEGLRDYQFLDSGQKKQIVNQLFKENRKVTEKDIIHYLHNVDGYDGIELKGIEKQFNASLSTYHDLLKIIKDKEFMDDAKNEAILENIVHTLTIFEDREMIKQRLAQYDSLFDEKVIKALTRRHYTGWGKLSAKLINGICDKQTGNTILDYLIDDGKINRNFMQLINDDGLSFKEIIQKAQVIGKTDDVKQVVQELSGSPAIKKGILQSIKIVDELVKVMGHAPESIVIEMARENQTTARGKKNSQQRYKRIEDSLKILASGLDSNILKENPTDNNQLQNDRLFLYYLQNGKDMYTGEALDINQLSSYDIDHIIPQAFIKDDSLDNRVLTSSKDNRGKSDNVPSIEVVQKRKAFWQQLLDSKLISERKFNNLTKAERGGLDERDKVGFIKRQLVETRQITKHVAQILDARYNTEVNEKDKKNRTVKIITLKSNLVSNFRKEFRLYKVREINDYHHAHDAYLNAVVAKAILKKYPKLEPEFVYGEYQKYDLKRYISRSKDPKEVEKATEKYFFYSNLLNFFKEEVHYADGTIVKRENIEYSKDTGEIAWNKEKDFAIIKKVLSLPQVNIVKKREVQTGGFSKESILPKGNSDKLIPRKTKDILLDTTKYGGFDSPVIAYSILLIADIEKGKAKKLKTVKTLVGITIMEKAAFEENPITFLENKGYHNVRKENILCLPKYSLFELENGRRRLLASAKELQKGNEIVLPVYLTTLLYHSKNVHKLDEPGHLEYIQKHRNEFKDLLNLVSEFSQKYVLADANLEKIKSLYADNEQADIEILANSFINLLTFTALGAPAAFKFFGKDIDRKRYTTVSEILNATLIHQSITGLYETWIDLSKLGED

SEQ ID NO: 225 - protein, 1370 aa, Streptococcus mitis; identical to SEQ ID NO: 224

SEQ ID NO: 226 - protein, 1366 aa, Streptococcus suis
MKKKYAIGIDIGTNSVGWSVVTDDYKVPSKKMKVFGNTEKRYIKKNLLGTLLFDEGNTAENRRLKRTARRRYTRRRNRILYLQEIFAEEINKIDDSFFQRLDDSFLIVEDKQGSKHPIFGTLQEEKEYHKQFPTIYHLRKQLADSSQKADIRLIYLALAHIIKYRGHFLFEGDLKSENKDVQHLFNDFVEMFDKTVEGSYLSENLPNVADVLVEKVSKSRRLENILHYFPNEKKNGLFGNFLALALGLQPNFKTNFELAEDAKIQFSKETYEEDLEELLGKIGDDYADLFIATKSLYDGILLAGILSTTDSTTKAPLSSSMVNRYEEHQKDLALLKNFIHQNLSDSYKEVFNDKLKDGYAGYIEGKTTQENFYRFIKKAIEKIEGSNYFIDKIDREDFLRKQRTFDNGSIPHQIHLQEMHAIIRRQAEFYPFLVENQDKIEKILTFRIPYYVGPLARGKSEFAWLNRKSDEKIRPWNFDEMVDKETSAENFITRMTNYDQYLPDQKVLPKHSLLYEKFAVYNELTKVRYVTEQGKSFFFDANMKQEIFDGVFKVYRKVTKEKLMDFLGKEFDEFRIVDLLGLDKDNKSFNASLGTYHDLKKIVSKDLLDNPENEDILENVVLTLTLFEDREMIRKRLEKYKDVLTEEQRKKLERRHYTGWGRLSAKLINGIRDKVTRKTILDYLIDDGTSNRNFMQLINDDTLSFVDEIRLAQGSGEAEDYRAEVQNLAGSPAIKKGILQSLKIVDELIEVMGYDPEHIVVEMARENQFTNQGRRNSQQRYKKIENAIKNLDSNLNSKILKEYPTNNQALQNDRLFLYYLQNGKDMYTDEELDIDQLSQYDIDHIIPQAFIKDDSLDNKVLTKSAKNRGKSDDVPSLEIVHKKKNFWKQLLDSQLISQRKFDNLTKAERGGLTNEDKARFIQRQLVETRQITKHVARILDTRFNTKLDEAGNRIRDPKVNIITLKSNLVSQFRKDYQLYKVREINNYHHAHDAYLNAVVATALLKKYPQLAPEFVYGDYPKYNSYKSRKSATEKVLFYSNIMNFFRRVLVYSKTGEVRIRPVIEVNKETGEIVWDKKSDFRTVRKVLSYPQVNVVKKVEMQTGGFSKESILQHGDSDKLIPRKTEKFYLDTKKYGGFDSPTIAYSVLLIADIEKGKAKKLKRVKELIGITIMERMAFEKNPIEFLEHKGYKNILEKNIIKLPKYSLFELENGRRRLLASAKELQKGNEMILPPHLVTLLYHSSNIHKITEPIHLNYVNKNKHEFKELLRHISDFSTRYILAQDRLSKIEELYDKNDGDDISDLTSSFVNLLTFTAIGAPAAFKFLGSVIDRKRYTSIAEILEATLIHQSVTGLYETRIDLSKLGGD

SEQ ID NO: 227 - protein, 1366 aa, Streptococcus suis
MKKKYAIGIDIGTNSVGWSVVTDDYKVPSKKMKVFGNTEKRYIKKNLLGTLLFDEGNTAENRRLKRTARRRYTRRRNRILYLQEIFAEEINKIDDSFFQRLDDSFLIVEDKQGSKHPIFGTLQEEKEYHKQFPTIYHLRKQLADSSQKADIRLIYLALAHIIKYRGHFLFEGDLKSENKDVQHLFNDFVEMFDKTVEGSYLSENLPNVADVLVEKVSKSRRLENILHYFPNEKKNGLFGNFLTLALGLQPNFKTNFELAEDAKIQFSKETYEEDLEELLGKIGDDYADLFIATKSLYDGILLAGILSTTDSTTKAPLSSSMVNRYEEHQKDLALLKNFIHQNLSDSYKEVFNDKLKDGYAGYIEGKTTQENFYRFIKKAIEKIEGSNYFIDKIDREDFLRKQRTFDNGSIPHQIHLQEMHAIIRRQAEFYPFLVENQDKIEKILTFRIPYYVGPLARGKSEFAWLNRKSDEKIRPWNFDEMVDKETSAENFITRMTNYDQYLPDQKVLPKHSLLYEKFAVYNELTKVRYVTEQGKSFFFDANMKQEIFDGVFKVYRKVTKEKLMDFLGKEFDEFRIVDLLGLDKDNKSFNASLGTYHDLKKIVSKDLLDNPENEDILENVVLTLTLFEDREMIRKRLEKYKDVLTEEQRKKLERRHYTGWGRLSAKLINGIRDKVTRKTILDYLIDDGTSNRNFMQLINDDTLSFVDEIRLAQGSGEAEDYRAEVQNLAGSPAIKKGILQSLKIVDELIEVMGYDPEHIVVEMARENQFTNQGRRNSQQRYKKIENAIKNLDSNLNSKILKEYPTNNQALQNDRLFLYYLQNGKDMYTDEELDIDQLSQYDIDHIIPQAFIKDDSLDNKVLTKSAKNRGKSDDVPSLEIVHKKKNFWKQLLDSQLISQRKFDNLTKAERGGLTNEDKARFIQRQLVETRQITKHVARILDTRFNTKLDEAGNRIRDPKVNIITLKSNLVSQFRKDYQLYKVREINNYHHAHDAYLNAVVATALLKKYPQLAPEFVYGDYPKYNSYKSRKSATEKVLFYSNIMNFFRRVLVYSKTGEVRIRPVIEVNKETGEIVWDKKSDFRTVRKVLSYPQVNVVKKVEMQTGGFSKESILQHGDSDKLIPRKTEKFYLDTKKYGGFDSPTIAYSVLLIADIEKGKAKKLKRVKELIGITIMERMAFEKNPIEFLEHKGYKNILEKNIIKLPKYSLFELENGRRRLLASAKELQKGNEMILPPHLVTLLYHSSNIHKITEPIHLNYVNKNKHEFKELLRHISDFSTRYILAQDRLSKIEELYDKNDGDDISDLTSSFVNLLTFTAIGAPAAFKFLGSVIDRKRYTSIAEILEATLIHQSVTGLYETRIDLSKLGGD

SEQ ID NO: 228 - protein, 1364 aa, Streptococcus suis
MKKKYAIGIDIGTNSVGWSVVTDDYKVPSKKMKVFGNTEKRYIKKNLLGTLLFDEGNTAENRRLKRTARRRYTRRRNRILYLQEIFAEEINKIDDSFFQRLDDSFLIVEDKQGSKHPIFGTLQEEKKYHKQFPTIYHLRKQLADSSQKADIRLIYLALAHIIKYRGHFLFEGDLKSENKDVQHLFNDFVEMFDKTVEGSYLSENLPNVADVLVEKVSKSRRLENILHYFPNEKKNGLFGNFLALALGLQPNFKTNFELAEDAKIQFSKETYEEDLEELLGKIGDDYADLFIATKSLYDGILLAGILSTTDSTTKAPLSSSMVNRYEEHKKDLALLKNFIHQNLSDSYKEVFNDKLKDGYAGYIEGKTTQENFYRFIKKAIEKIEGSDYFIDKIDREDFLRKQRTFDNGSIPHQIHLQEMHAIIRRQAEFYPFLVENQDKIEKILTFRIPYYVGPLARGKSEFAWLNRKSDEKIRPWNFDEMVDKETSAENFITRMTNYDQYLPDQKVLPKHSLLYEKFAVYNELTKVKFIAEGMRDYQFLDSGQKKDIVKTLFKTKRKVTAKDIKAYLENSNGYAGVELKGLEEQFNASLPTYHDLLKILRDKAFIDAEENQEILEDIVLTLTLFEDREMIRKRLEKYKDILTEEQRKKLERRHYTGWGRLSAKLINGILDKVTRKTILGYLIDDGTSNRNFMQLINDDTLSFVDEIRLAQGSGEAEDYRAEVQNLAGSPAIKKGILQSLKIVDELIEVMGYDPEHIVVEMARENQFTNQGRRNSQQRYKKIENAIKNLDSNLNSKILKEYPTNNQALQNDRLFLYYLQNGKDMYTDEELDIDQLSQYDIDHIIPQAFIKDDSLDNKVLTKSAKNRGKSDDVPSLEIVHKKKNFWKQLLDSQLISQRKFDNLTKAERGGLTNEDKARFIQRQLVETRQITKHVARILDTRFNTKLDEAGNRIRDPKVNIITLKSNLVSQFRKDYQLYKVREINNYHHAHDAYLNAVVATALLKKYPQLAPEFVYGDYPKYNSYKSRKSATEKVLFYSNIMNFFRRVLVYSKTGEVRIRPVIEVNKETGEIVWDKKSDFKTVRKVLSYPQVNVVKKVEMQTGGFSKESILQHGDSDKLIPRKTEKFYLDTKKYGGFDSPTIAYSVLLIADIEKGKAKKLKRVKELIGITIMERMAFEKNPIEFLEHKGYKNILEKNIIKLPKYSLFELENGRRRLLASAKELQKGNEMILPPHLVTLLYHSSNIHKITEPIHLNYVNKNKHEFKELLRHISDFSTRYILAQDRLSKIEELYDKNDGDDISDLTSSFVNLLTFTAIGAPAAFKFLGSVIDRKRYTSIAEILEATLIHQSVTGLYETRIDLSKLGGD

SEQ ID NO: 229 - protein, 1364 aa, Streptococcus suis
MKKKYAIGIDIGTNSVGWSVVTDDYKVPSKKMKVFGNTEKRYIKKNLLGTLLFDEGNTAENRRLKRTARRRYTRRRNRILYLQEIFAEEINKIDDSFFQRLDDSFLIVEDKQGSKHPIFGTLQEEKKYHKQFPTIYHLRKQLADSSQKADIRLIYLALAHIIKYRGHFLFEGDLKSENKDVQHLFNDFVEMFDKTVEGSYLSENLPNVADVLVEKVSKSRRLENILHYFPNEKKNGLFGNFLALALGLQPNFKTNFELAEDAKIQFSKETYEEDLEELLGKIGDDYADLFIATKSLYDGILLAGILSTTDSTTKAPLSSSMVNRYEEHKKDLALLKNFIHQNLSDSYKEVFNDKLKDGYAGYIEGKTTQENFYRFIKKAIEKIEGSDYFIDKIDREDFLRKQRTFDNGSIPHQIHLQEMHAIIRRQAEFYPFLVENQDKIEKILTFRIPYYVGPLARGKSEFAWLNRKSDEKIRPWNFDEMVDKETSAENFITRMTNYDQYLPDQKVLPKHSLLYEKFAVYNELTKVKFIAEGMRDYQFLDSGQKKDIVKTLFKTKRKVTAKDIKAYLENSNGYAGVELKGLEEQFNASLPTYHDLLKILRDKAFIDAEENQEILEDIVLTLTLFEDREMIRKRLEKYKDILTEEQRKKLERRHYTGWGRLSAKLINGILDKVTRKTILGYLIDDGTSNRNFMQLINDDTLSFVDEIRLAQGSGEAEDYRAEVQNLAGSPAIKKGILQSLKIVDELIEVMGYDPEHIVVEMARENQFTNQGRRNSQQRYKKIENAIKNLDSNLNSKILKEYPTNNQALQNDRLFLYYLQNGKDMYTDEELDIDQLSQYDIDHIIPQAFIKDDSLDNKVLTKSAKNRGKSDDVPSLEIVHKKKNFWKQLLDSQLISQRKFDNLTKAERGGLTNEDKARFIQRQLVETRQITKHVARILDTRFNTKLDEAGNRIRDPKVNIITLKSNLVSQFRKDYQLYKVREINNYHHAHDAYLNAVVATALLKKYPQLAPEFVYGDYPKYNSYKSRKSATEKVLFYSNIMNFFRRVLVYSKTGEVRIRPVIEVNKETGEIVWDKKSDFRTVRKVLSYPQVNVVKKVEMQTGGFSKESILQHGDSDKLIPRKTEKFYLDTKKYGGFDSPTIAYSVLLIADIEKGKAKKLKRVKELIGITIMERMAFEKNPIEFLEHKGYKNILEKNIIKLPKYSLFELENGRRRLLASAKELQKGNEMILPPHLVTLLYHSSNIHKITEPIHLNYVNKNKHEFKELLRHISDFSTRYILAQDRLSKIEELYDKNDGDDISDLTSSFVNLLTFTAIGAPAAFKFLGSVIDRKRYTSIAEILEATLIHQSVTGLYETRIDLSKLGGD

SEQ ID NO: 230 - protein, 1377 aa, Streptococcus sanguinis
MKKPYSIGLDIGTNSVGWAVITDDYKVPSKKMKVLGNTDKHFIKKNLIGALLFDEGTTAEDRRLKRTSRRRYTRRKNRLRYLQEIFSEEISKLDSSFFHRLDDSFLVPEDKRGSKYPIFATLEEEKEYHKKFPTIYHLRKHLADSKEKTDLRLIYLALAHMIKYRGHFLYEESFDIKNNDIQKIFNEFISIYDNTFEGSSLSGQNAQVEAIFTDKISKSTKRERVLKLFSDEKSTGLFSEFLKLIVGNQADFKKHFDLEEKAPLQFSKDTYDEDLENLLGQIGDGFADLFLVAKKLYDAILLSGILTVTDPSTKAPLSASMIERYENHQEDLAALKQFIKNNLSEKYAEVFSDQSKDGYAGFIDGKTTQEAFYKYIKNLLSKLEGADYFLNKIEREDFLRKQRTFDNGSIPHQIHLQEMNAILRRQGEHYLFLKENREKIEKILAFRIPYYVGPLARGNRDFAWLTRNSDQAIRPWNFEEVVDKASSAEDFINKMTNYDLYLPEEKVLPKHSLLYETFAVYNELTKVKFIAEGLRDYQFLDSGQKKQIVNQLFKDKRKVTEKDIIHYLHNVDGYDGIELKGIEKQFNASLSTYHDLLKIIKDKEFMDNPKNGEILENIIHTLTIFEDREMIKQRLAQYDTLFDEKVIKALTRRHYTGWGKLSAKLINGIRDKQTGKTILEYLIDDGDCNRNFMQLINDDGLSFKEIIQKAQVVGKTDDVKQVVQEIPGSPAIKKGILQSIKIVDELVKVMGHNPESIVIEMARENQTTAKGKKNSQQRYKRIEDALKNLAPGLDSNILKENPTDNIQLQNDRLFLYYLQNGKDMYTGKAIDINQLSNYDIDHIIPQAFIKDDSLDNRVLTSSKDNRGKSDNVPSIEVVQKRKAFWQQLLDSKLISERKFNNLTKAKRGGLDERDKVGFIKRQLVETRQITKHVAQLLDTRFNTEVNEENQKIRTVKIITLKSNLVSNFRKEFGLYKVREINDYHHAHDAYLNAVVAKAILKKYPKLEPEFVYGDYQKYDLKRYILKSKASNTIDKATEKYFFYSNLLNFFKEKVRYADGTIKKRENIEYSNDTGEIAWNKEKDFATIKKVLSLPQVNIVKKTEEQTVGQNGGLFDNNIVSKKKVVDASKLIPIKSSLSPEKYGGYARPTIAYSVLVIADIEKGKGKAKKLKRIKEIVGITIQDKKKFESNPVTYLEECGYKNINSNLIIKLPKYSLFEFNDGQRRLLASSIELQKGNELILPYHLTALLYHAQRINKISEPIHKQYVEAHQNEFKELLTTIISLSKKYIQKPNVELLLQQAFDQADKDIYQLSESFISLLKLTSFGAPGAFKFLGVEISQSSVRYKPNSQFLDTTLIHQSITGLYETRIDLSKLGED

SEQ ID NO: 231 - protein, 1353 aa, Streptococcus massiliensis
MKKPYSIGLDIGTNSVGWAVVMEDYKVPSKKMKVLGNTDKQSIKKNLIGALLFDSGETAVERRLNRTTSRRYDRRRNRIRYLQHIFAEEMNRADENFFHRLKESFFVEEDKTYSKYPIFGTLEEEKNYHKNYPTIYHLRKTLADTPDKMDIRLIYLALAHIIKYRGHFLIEGDLDIENIGIQDSFKSFIEEYNTQFGTKLDSTTKVEAIFTENSSKAKRVETILGLFPDETAAGNLDKFLKLMLGNQADFKKVFDLEEKITLQFSKDSYEEDLELLLSKIDEEYAALFDLAKKVYDAVLLSNILTVKEKNTKAPLSASMIKRYEEHKDDLKAFKRFFRERLPEKYETMFKDLTKPSYAAYVSGLYKKDAKRGLVPTSKRVTEDDFYKFSKGLLIDVEGAEYFLEKIEREDFLRKQRTFDNGAIPNQVHVKELQAIILNQSKYYPFLAENKEKIEKILTFRIPYYVGPLARGNSSFAWLQRKSDEAIRPWNFEQVVDMETSASRFIERMTLHDLYLPDEKVLPRHSLIYEKYTVFNELTKVRFTPEGGKEVYFSKTDKENIFDSLFKRYRKVTKRKLKDFIEKELGYGYIDIDNIKGVEEQFNASYTTYQDLLKIIGDKEFLDNEENKDLLEEIIYILTVFEDRKMIEKRLSELNIPFENKIIKKLARKKYTGWGNLSRKLIDGIRNRETNRTILGHLIDDGFSNRNLMQLINDDGLDFKEIIRKAQTIENIDTNQALVSSLPGSPAIKKGILQSLNIVDEIIAIMGYAPTNIVIEMARENQTTQKGRDNSAQRLKKIEDGIKLLGSDLLKQNPIQDNKDLQKEKLFLYYMQNGIDLYTGQPLNCDPDSLAFYDVDHIVPRSYIKNDSFDNKVLTTSKGNRKKLDDVPAKEVVEKMENTWRRLHAAGLISDIKLSYLMKGELTEEDKAGFIRRQLVETRQITKHVARLLDEKLNRKKNENGEKLRTTKIITLKSVFASRFRANFDLYKLRELNHYHHAHDAYLNAVVAQALLKVYPKFERELVYGSYVKESIFSRKISATERMRMYNNILKFISKDKKVDQETGEIVWDKKEIENIVKKVIYSSPVNIVKKREEQSGALFKQSNMAVGYNNKLIPRKKDWSVDKYGGFIEPAESYSLAIFYTDINGKKPKKKSTIIAISRMEKKDYEKEPERFLAQKGFERVEKTIKLPKYSLFEMEKGRRRLLASSGELQKGNQVLLPEHLIRLLSYAKKVDVLVKSKDDDYDLEEHRAEFAELLDCIKKFNDMYILASSNMSKIEEIYQKNIDAPIEEVARSFVALLNFTMMGAATDFKFFGQIIPRKRYPSTTECLKSTLIHQSVTGLYETRIDLSKLGEN

SEQ ID NO: 232 - protein, 1345 aa, Streptococcus mutans
MKKPYSIGLDIGTNSVGWAVVTDDYKVPAKKMKVLGNTDKSHIEKNLLGALLFDSGNTAEDRRLKRTARRRYTRRRNRILYLQEIFSEEMGKVDDSFFHRLEDFFLVTEDKRGERHPIFGNLEEEVKYHENFPTIYHLRQYLADNPEKVDLRLVYLALAHIIKFRGHFLIEGKFDTRNNDVQRLFQEFLAVYDNTFENSSLQEQNVQVEEILTDKISKSAKKDRVLKLFPNEKSNGRFAEFLKLIVGNQADFKKHFELEEKAPLQFSKDTYEEELEVLLAQIGDNYAELFLSAKKLYDSILLSGILTADDSSTKAPLSASMIQRYNEHQMDLAQLKQFIRQKLSDKYNEVFSDVSKDGYAGYIDGKTNQEAFYKYLKGLLNKIEGSGYFLDKIEREDFLRKQRTFDNGSIPHQIHLQEMRAIIRRQSEFYPFLADNQDRIEKILTFRIPYYVGPLARGKSDFAWLSRKSADKITPWNFDEIVDKESSAEAFINRMTNYDLYLPNQKVLPKHSLLYEKFTVYNELTKVKYKTEQGETAFFDANMKQEIFDGVFKVYRKVTKDKLMDFLEKEFDEFRIVDLTGLDKENKAFNASYGTYHDLRKILDKDFLDNSKNEKILEDIVLTLTLFEDREMIRKRLKNYSDLLTKEQLKKLERRHYTGWGRLSAELIHGIRNKESRKTILDYLIDDGNSNRNFMQLINDDALSFKEEIAKAQVIGETDNLNQVVSDIAGSPAIKKGILQSLKIVDELVKIMGHQPENIVVEMARENQFTNQGRRNSQQRLKGLTDSIKEFGSQILKEHPVENSQLQNDRLFLYYLQNGRDMYTGEELDIDYLSQYDIDHIIPQAFIKDNSIDNRVLTSSKENRGKSDDVPSKDVVRKMKPYWSKLLSAKLITQRKFDNLTKAERGGLTDDDKAGFIKRQLVETRQITKHVARILDERFNTETDENNKKIRQVKIVTLKSNLVSNFRKEFELYKVREINDYHHAHDAYLNAVIGKALLGVYPQLEPEFVYGDYPHFHGHEENKATAKKFFYSNIMNFFKKDDVRTDKNGEIIWKKDEHISNIKKVLSYPQVNIVKKVEEQTGGFSKESILPKGNSDKLIPRKTKKFYWDTKKYGGFDSPIVAYSILVIADIEKGKSKKLKTVKALVGVTIMEKMTFERDPVAFLERKGYRNVQEENIIKLPKYSLFKLENGRKRLLASARELQKGNEIVLPNHLGTLLYHAKNIHKVDEPKHLDYVDKHKDEFKELLDVVSNFSKKYTLAEGNLEKIKELYAQNNGEDLKELASSFINLLTFTAIGAPATFKFFDKNIDRKRYTSTTEILNATLIHQSITGLYETRIDLSKLGGD

SEQ ID NO: 233 - protein, 1345 aa, Streptococcus mutans
MKKPYSIGLDIGTNSVGWAVVTDDYKVPAKKMKVLGNTDKSHIEKNLLGALLFDSGNTAEDRRLKRTARRRYTRRRNRILYLQEIFSEEMGKVDDSFFHRLEDSFLVTEDKRGERHPIFGNLEEEVKYHENFPTIYHLRQYLADNPEKVDLRLVYLALAHIIKFRGHFLIEGKFDTRNNDVQRLFQEFLAVYDNTFENSSLQEQNVQVEEILTDKISKSAKKDRVLKLFPNEKSNGRFAEFLKLIIGNQADFKKHFELEEKAPLQFSKDTYEEELEVLLAQIGDNYAELFLSAKKLYDSILLSGILTVTDVGTQAPLSASMIQRYNEHQMDLAQLKQFIRQKLSDKYNEVFSDVSKDGYAGYIDGKTNQEAFYKYLKGLLNKIEGSGYFLDKIEREDFLRKQRTFDNGSIPHQIHLQEMRAIIRRQAEFYPFLADNQDRIEKLLTFRIPYYVGPLARGKSDFAWLSRKSADKITPWNFDEIVDKESSAEAFINRMTNYDLYLPNQKVLPKHSLLYEKFTVYNELTKVKYKTEQGKTAFFDANMKQEIFDGVFKVYRKVTKDKLMDFLEKEFDEFRIVDLTGLDKENKVFNASYGTYHDLCKILDKDFLDNSKNEKILEDIVLTLTLFEDREMIRKRLENYSDLLTKEQVKKLERRHYTGWGRLSAELIHGIRNKESRKTILDYLIDDGNSNRNFMQLINDDALSFKEEIAKAQVIGETDNLNQVVSDIAGSPAIKKGILQSLKIVDELVKIMGHQPENIVVEMARENQFTNQGRRNSQQRLKGLTDSIKEFGSQILKEHPVENSQLQNDRLFLYYLQNGRDMYTGEELDIDYLSQYDIDHIIPQAFIKDNSIDNRVLTSSKENRGKSDDVPSKDVVRKMKSYWSKLLSAKLITQRKFDNLTKAERGGLTDDDKAGFIKRQLVETRQITKHVARILDERFHTETDENNKKIRQVKIVTLKSNLVSNFRKEFELYKVREINDYHHAHDAYLNAVIGKALLGVYPQLEPEFVYGDYPHFHGHKENKATAKKFFYSNIMNFFKKDDVRTDKNGEIIWKKDEHISNIKKVLSYPQVNIVKKVEEQTGGFSKESILPKGNSDKLIPRKTKKFYWDTKKYGGFDSPIVAYSILVIADIEKGKSKKLKTVKALVGVTIMEKMTFERDPVAFLERKGYRNVQEENIIKLPKYSLFKLENGRKRLLASARELQKGNEIVLPNHLGTLLYHAKNIHKVDEPKHLDYVDKHKDEFKELLDVVSNFSKKYTLAEGNLEKIKELYAQNNGEDLKELASSFINLLTFTAIGAPATFKFFDKNIDRKRYTSTTEILNATLIHQSITGLYETRIDLNKLGGD

SEQ ID NO: 234 - protein, 1345 aa, Streptococcus mutans
MKKPYSIGLDIGTNSVGWAVVTDDYKVPAKKMKVLGNTDKSHIEKNLLGALLFDSGNTAEDRRLKRTARRRYTRRRNRILYLQEIFSEEMGKVDDSFFHRLEDSFLVTEDKRGERHPIFGNLEEEVKYHENFPTIYHLRQYLADNPEKVDLRLVYLALAHIIKFRGHFLIEGKFDTRNNDVQRLFQEFLAVYDNTFENSSLQEQNVQVEEILTDKISKSAKKDRVLKLFPNEKSNGRFAEFLKLIVGNQADFKKHFELEEKAPLQFSKDTYEEELEVLLAQIGDNYAELFLSAKKLYDSILLSGILTVTDVGTKAPLSASMIQRYNEHQMDLAQLKQFIRQKLSDKYNEVFSDVSKDGYAGYIDGKTNQEAFYKYLKGLLNKIEGSGYFLDKIEREDFLRKQRTFDNGSIPHQIHLQEMRAIIRRQAEFYPFLADNQDRIEKLLTFRIPYYVGPLARGKSDFAWLSRKSADKITPWNFDEIVDKESSAEAFINRMTNYDLYLPNQKVLPKHSLLYEKFTVYNELTKVKYKTEQGKTAFFDANMKQEIFDGVFKVYRKVTKDKLMDFLEKEFDEFRIVDLTGLDKENKVFNASYGTYHDLCKILDKDFLDNSKNEKILEDIVLTLTLFEDREMIRKRLENYSDLLTKEQVKKLERRHYTGWGRLSAELIHGIRNKESRKTILDYLIDDGNSNRNFMQLINDDALSFKEEIAKAQVIGETDNLNQVVSDIAGSPAIKKGILQSLKIVDELVKIMGHQPENIVVEMARENQFTNQGRRNSQQRLKGLTDSIKEFGSQILKEHPVENSQLQNDRLFLYYLQNGRDMYTGEELDIDYLSQYDIDHIIPQAFIKDNSIDNRVLTSSKENRGKSDDVPSKDVVRKMKSYWSKLLSAKLITQRKFDNLTKAERGGLTDDDKAGFIKRQLVETRQITKHVARILDERFNTETDENNKKIRQVKIVTLKSNLVSNFRKEFELYKVREINDYHHAHDAYLNAVIGKALLGVYPQLEPEFVYGDYPHFHGHKENKATAKKFFYSNIMNFFKKDDVRTDKNGEIIWKKDEHISNIKKVLSYPQVNIVKKVEEQTGGFSKESILPKGNSDKLIPRKTKKFYWDTKKYGGFDSPIVAYSILVIADIEKGKSKKLKTVKALVGVTIMEKMTFERDPVAFLERKGYRNVQEENIIKLPKYSLFKLENGRKRLLASARELQKGNEIVLPNHLGTLLYHAKNIHKVDEPKHLDYVDKHKDEFKELLDVVSNFSKKYTLAEGNLEKIKELYAQNNGEDLKELASSFINLLTFTAIGAPATFKFFDKNIDRKRYTSTTEILNATLIHQSITGLYETRIDLNKLGGD

SEQ ID NO: 235 - protein, 1345 aa, Streptococcus mutans
MKKPYSIGLDIGTNSVGWAVVTDDYKVPAKKMKVLGNTDKSHIEKNLLGALLFDSGNTAEDRRLKRTARRRYTRRRNRILYLQEIFSEEMGKVDDSFFHRLEDSFLVTEDKRGERHPIFGNLEEEVKYHENFPTIYHLRQYLADNPEKVDLRLVYLALAHIIKFRGHFLIEGKFDTRNNDVQRLFQEFLAVYDNTFENSSLQEQNVQVEEILTDKISKSAKKDRVLKLFPNEKSNGRFAEFLKLIVGNQADFKKHFELEEKAPLQFSKDTYEEELEVLLAQIGDNYAELFLSAKKLYDSILLSGILTVTDVGTKAPLSASMIQRYNEHQMDLAQLKQFIRQKLSDKYNEVFSDVSKDGYAGYIDGKTNQEAFYKYLKGLLNKIEGSGYFLDKIEREDFLRKQRTFDNGSIPHQIHLQEMRAIIRRQAEFYPFLADNQDRIEKLLTFRIPYYVGPLARGKSDFAWLSRKSADKITPWNFDEIVDKESSAEAFINRMTNYDLYLPNQKVLPKHSLLYEKFTVYNELIKVKYKTEQGKTAFFDANMKQEIFDGVFKVYRKVTKDKLMDFLEKEFDEFRIVDLTGLDKENKVFNASYGTYHDLCKILDKDFLDNSKNEKILEDIVLTLTLFEDREMIRKRLENYSDLLTKEQVKKLERRHYTGWGRLSAELIHGIRNKESRKTILDYLIDDGNSNRNFMQLINDDALSFKEEIAKAQVIGETDNLNQVVSDIAGSPAIKKGILQSLKIVDELVKIMGHQPENIVVEMARENQFTNQGRRNSQQRLKGLTDSIKEFGSQILKEHPVENSQLQNDRLFLYYLQNGRDMYTGEELDIDYLSQYDIDHIIPQAFIKDNSIDNRVLTSSKENRGKSDDVPSKDVVRKMKSYWSKLLSAKLITQRKFDNLTKAERGGLTDDDKAGFIKRQLVETRQITKHVARILDERFNTETDENNKKIRQVKIVTLKSNLVSNFRKEFELYKVREINDYHHAHDAYLNAVIGKALLGVYPQLEPEFVYGDYPHFHGHKENKATAKKFFYSNIMNFFKKDDVRTDKNGEIIWKKDEHISNIKKVLSYPQVNIVKKVEEQTGGFSKESILPKGNSDKLIPRKTKKFYWDTKKYGGFDSPIVAYSILVIADIEKGKSKKLKTVKALVGVTIMEKMTFERDPVAFLERKGYRNVQEENIIKLPKYSLFKLENGRKRLLASARELQKGNEIVLPNHLGTLLYHAKNIHKVDEPKHLDYVDKHKDEFKELLDVVSNFSKKYTLAEGNLEKIKELYAQNNGEDLKELASSFINLLTFTAIGAPATFKFFDKNIDRKRYTSTTEILNATLIHQSITGLYETRIDLNKLGGD

SEQ ID NO: 236 - protein, 1345 aa, Streptococcus mutans
MKKPYSIGLDIGTNSVGWAVVTDDYKVPAKKMKVLGNTDKSHIEKNLLGALLFDSGNTAEDRRLKRTARRRYTRRRNRILYLQEIFSEEMGKVDDSFFHRLEDSFLVTEDKRGERHPIFGNLEEEVKYHENFPTIYHLRQYLADNPEKVDLRLVYLALAHIIKFRGHFLIEGKFDTRNNDVQRLFQEFLAVYDNTFENSSLQEQNVQVEEILTDKISKSAKKDRVLKLFPNEKSNGRFAEFLKLIVGNQADFKKHFELEEKVPLQFSKDTYEEELEVLLAQIGDNYAELFLSAKKLYDSILLSGILTVTDVGTKAPLSASMIQRYNEHQMDLAQLKQFIRQKLSDKYNEVFSDVSKDGYAGYIDGKTNQEAFYKYLKGLLNKIEGSGYFLDKIEREDFLRKQRTFDNGSIPHQIHLQEMRAIIRRQAEFYPFLADNQDRIEKLLTFRIPYYVGPLARGKSDFAWLSRKSADKITPWNFDEIVDKESSAEAFINRMTNYDLYLPNQKVLPKHSLLYEKFTVYNELTKVKYKTEQGKTAFFDANMKQEIFDGVFKVYRKVTKDKLMDFLEKEFDEFRIVDLTGLDKENKVFNASYGTYHDLCKILDKDFLDNSKNEKILEDIVLTLTLFEDREMIRKRLENYSDLLTKEQVKKLERRHYTGWGRLSAELIHGIRNKESRKTILDYLIDDGNSNRNFMQLINDDALSFKEEIAKAQVIGETDNLNQVVSDIAGSPAIKKGILQSLKIVDELVKIMGHQPENIVVEMARENQFTNQGRRNSQQRLKGLTDSIKEFGSQILKEHPVENSQLQNDRLFLYYLQNGRDMYTGEELDIDYLSQYDIDHIIPQAFIKDNSIDNRVLTSSKENRGKSDDVPSKDVVRKMKSYWSKLLSAKLITQRKFDNLTKAERGGLTDDDKAGFIKRQLVETRQITKHVARILDERFNTETDENNKKIRQVKIVTLKSNLVSNFRKEFELYKVREINDYHHAHDAYLNAVIGKALLGVYPQLEPEFVYGDYPHFHGHKENKATAKKFFYSNIMNFFKKDDVRTDKNGEIIWKKDEHISNIKKVLSYPQVNIVKKVEEQTGGFSKESILPKGNSDKLIPRKTKKFYWDTKKYGGFDSPIVAYSILVIADIEKGKSKKLKTVKALVGVTIMEKMTFERDPVAFLERKGYRNVQEENIIKLPKYSLFKLENGRKRLLASARELQKGNEIVLPNHLGTLLYHAKNIHKVDEPKHLDYVDKHKDEFKELLDVVSNFSKKYTLAEGNLEKIKELYAQNNGEDLKELASSFINLLTFTAIGAPATFKFFDKNIDRKRYTSTTEILNATLIHQSITGLYETRIDLNKLGGD

SEQ ID NO: 237 - protein, 1345 aa, Streptococcus mutans
MKKPYSIGLDIGTNSVGWAVVTDDYKVPAKKMKVLGNTDKSHIEKNLLGALLFDSGNTAEDRRLKRTARRRYTRRRNRILYLQEIFSEEMGKVDDSFFHRLEDSFLVTEDKRGERHPIFGNLEEEVKYHENFPTIYHLRQYLADNPEKVDLRLVYLALAHIIKFRGHFLIEGKFDTRNNDVQRLFQEFLAVYDNTFENSSLQEQNVQVEEILTDKISKSAKKDRVLKLFPNEKSNGRFAEFLKLIVGNQADFKKHFELEEKAPLQFSKDTYEEELEVLLAQIGDNYAELFLSAKKLYDSILLSGILTVTDVGTKAPLSASMIQRYNEHQMDLAQLKQFIRQKLSDKYNEVFSDVSKDGYAGYIDGKTNQEAFYKYLKGLLNKIEGSGYFLDKIEREDFLRKQRTFDNGSIPHQIHLQEMRAIIRRQAEFYPFLADNQDRIEKLLTFRIPYYVGPLARGKSDFAWLSRKSADKITPWNFDEIVDKESSAEAFINRMTNYDLYLPNQKVLPKHSLLYEKFTVYNELTKVKYKTEQGKTAFFDANMKQEIFDGVFKVYRKVTKDKLMDFLEKEFDEFRIVDLTGLDKENKVFNASYGTYHDLCKILDKDFLDNSKNEKILEDIVLTLTLFEDREMIRKRLENYSDLLTKEQVKKLERRHYTGWGRLSAELIHGIRNKESRKTILDYLIDDGNSNRNFMQLINDDALSFKEEIAKAQVIGETDNLNQVVSDIAGSPAIKKGILQSLKIVDELVKIMGHQPENIVVEMARENQFTNQGRRNSQQRLKGLTDSIKEFGSQILKEHPVENSQLQNDRLFLYYLQNGRDMYTGEELDIDYLSQYDIDHIIPQAFIKDNSIDNRVLTSSKENRGKSDDVPSKDVVRKMKSYWSKLLSAKLITQRKFDNLTKAERGGLTDDDKAGFIKRQLVETRQITKHVARILDERFNTETDENNKKIRQVKIVTLKSNLVSNFRKEFELYKVREINDYHHAHDAYLNAVIGKALLGVYPQLEPEFVYGDYPHFHGHKENKATAKKFFYSNIMNFFKKDDVRTDKNGEIIWKKDEHISNIKKVLSYPQVNIVKKVEEQTGGFSKESILPKGNSDKLIPRKTKKFYWDTKKYGGFDSPIVAYSILVIADIEKSKSKKLKTVKALVGVTIMEKMTFERDPVAFLERKGYRNVQEENIIKLPKYSLFKLENGRKRLLASARELQKGNEIVLPNHLGTLLYHAKNIHKVDEPKHLDYVDKHKDEFKELLDVVSNFSKKYTLAEGNLEKIKELYAQNNGEDLKELASSFINLLTFTAIGAPATFKFFDKNIDRKRYTSTTEILNATLIHQSITGLYETRIDLNKLGGD

SEQ ID NO: 238 - protein, 1355 aa, Streptococcus mutans
MKKPYSIGLDIGTNSVGWAVVTDDYKVPAKKMKVLGNTDKSHIKKNLLGALLFDSGNTAADRRLKRTARRRYTRRRNRILYLQEIFAEEMNKVDDSFFHRLDESFLTDDDKNFDSHPIFGNKAEEDAYHQKFPTIYHLRKHLADSTEKADLRLVYLALAHMIKFRGHFLIEGELNAENTDVQKLFADFVGVYDRTFDDSHLSEITVDASSILTEKISKSRRLEKLINNYPKEKKNTLFGNLIALSLGLQPNFKTNFKLSEDAKLQFSKDTYEEDLEELLGKIGDDYADLFTLAKNLYDAILLSGILTADDSSTKAPLSASMIKRYAEHHEDLEKLKEFIKANKPELYHDIFKDETKNGYAGYIENGVKQDEFYKYLKNTLSKIAGSDYFLDKIEREDFLRKQRTFDNGSIPHQIHLQEMHAILRRQGDYYPFLKENQDRIEKILTFRIPYYVGPLARKNSRFAWAEYHSDEAVTPWNFDQVIDKESSAQAFIEHMTNNDLYLPNEKVLPKHSPLYEKYTVYNELTKIKYVTEIGEAKFFDANLKQEIFDGLFKHERKVTKKKLRTFLDKNFDEFRIVDIQGLDKETETFNASYATYQDLLKVIKDKVFMDNPENAEILENIVLTLTLFEDREMIKQRLAKYADVFDKKVIDQLARRHYTGWGRLSAKLLNGIRDKQSCKTIMDYLIDDAQSNRNLMQLITDDNLTFKDDIVKAQYVDNSDDLHQVVQSLAGSPAIKKGILQSLKIVDELVKVMGKEPEQIVVEMARENQTTAKGRRNSQQRYKRLKEAIKSLDRDLNHKILKEHPTDNQALQNNRLFLYYLQNGRDMYTGESLDINRLSDYDIDHVIPQAFIKDNSIDNRVLTSSKANRGKSDDVPSEDVVNRMRPFWNKLLSSGLISQRKYNNLTKKELTLDDKAGFIKRQLVETRQITKHVARMLDERFNKEFDDNNKRIRRVKIVTLKSNLVSSFRKEFELYKVREINDYHHAHDAYLNAVVVKALLVKYPKLEPEFVYGEYPKYNSYRERKTATQKMFFYSNIMNMFKSKVKLADDQIVERPMIEVNDETGEIAWDKTKHITTVKKVLSYPQVNIVKKVEEQTIGQNGGLFDDNPKSPLEVIPSKLVPLKKALNPEKYGGYQKPTTAYPILLIVDTKQLIPISVMDKKRFEQNPVKFLKDKGYQQIEKNNFVKLPKYTLVDIGNGIKRLWASSKEVHKGNQLVVSKKSQDLLYHAHHLDNDYSNEYVKNHYQQFDILFNEITSFSKKCKLGKEHIQKIEEAYSKERDSASIEELADGFIKLLGFTQLGATSPFSFLGIKLNQKQYTGKKDYLLPCMEATLIHQSITGLYETRIDLSKLGGD

SEQ ID NO: 239 - protein, 1345 aa, Streptococcus mutans
MKKPYSIGLDIGTNSVGWAVVTDDYKVPAKKMKVLGNTDKSHIKKNLLGALLFDSGNTAADRRLKRTARRRYTRRRNRILYLQEIFAEEMSKVDDSFFHRLEDSFLVTEDKRGERHPIFGNLEEEVKYHENFPTIYHLRQYLADNPEKVDLRLVYLALAHIIKFRGHFLIEGKFDTRNNDVQRLFQEFLAVYDNTFENSSLQEQNVQVEEILTDKISKSAKKDRVLKLFPNEKSNGRFAEFLKLIVGNQADFKKHFELEEKAPLQFSKDTYEEELEVLLTQIGDNYAELFLSAKKLYDSILLSGILTVTDVSTKAPLSASMIQRYNEHQMDLAQLKQFIRQKLSDKYNEVFSDVSKDGYAGYIDGKTNQEAFYKYLKGLLNKIEGSGYFLDKIEREDFLRKQRTFDNGSIPHQIHLQEMRAIIRRQAEFYPFLADNQDRIEKILTFRIPYYVGPLARGKSDFAWLSRKSADKITPWNFDEIVDKESSAEAFINRMTNYDLYLPNQKVLPKHSLLYEKFTVYNELTKVKYKTEQGKTAFFDANMKQEIFDGVFKVYRKVTKDKLMDFLEKEFDEFRIVDLTGLDKENKAFNASYGTYHDLRKILDKDFLDNSKNEKILEDIVLTLTLFEDREMIRKRLENYSDLLTKEQVKKLERRHYTGWGRLSAELIHGIRNKESRKTLLDYLIDDGNSNRNFMQLINDDALSFKEEIAKAQVIGETDNLNQVVSDIAGSPAIKKGILQSLKIVDELVKIMGHQPENIVVEMARENQFTNQGRRNSQQRLKGLTDSIKEFGSQILKEHPVENSQLQNDRLFLYYLQNGRDMYTGEELDIDYLSQYDIDHIIPQAFIKDNSIDNRVLTSSKENRGKSDDVPSKDVVRKMKPYWSKLLSAKLITQRKFDNLTKAERGGLTDDDKAGFIKRQLVETRQITKHVARILDERFNTETDENNKKIRQVKIVTLKSNLVSNFRKEFELYKVREINDYHHAHDAYLNAVIGKALLGVYPQLEPEFVYGDYPHFHGHEENKATAKKFFYSNIMNFFKKDDVRTDKNGEIIWKKDEHISNIKKVLSYPQVNIVKKVEEQTGGFSKESILPKGNSDKLIPRKTKKFYWDTKKYGGFDSPIVAYSILVIADIEKGKSKKLKTVKALVGVTIMEKMTFERDPVAFLERKGYRNVQEENIIKLPKYSLFKLENGRKRLLASARELQKGNEIVLPNHLGTLLYHAKNIHKVDEPKHLDYVDKHKDEFKELLDVVSNFSKKYTLAEGNLEKIKELYAQNNGEDLKELSSSFINLLTFTAIGAPAAFKFFDKNIDRKRYTSTTEILNATLIHQSITGLYETRIDLSKLGGD

SEQ ID NO: 240 - protein, 1345 aa, Streptococcus mutans
MKKPYSIGLDIGTNSVGWAVVTDDYKVPAKKMKVLGNTDKSHIKKNLLGALLFDSGNTAADRRLKRTARRRYTRRRNRILYLQEIFAEEMSKVDDSFFHRLEDSFLVTEDKRGERHPIFGNLEEEVKYHENFPTIYHLRQYLADNPEKVDLRLVYLALAHIIKFRGHFLIEGKFDTRNNDVQRLFQEFLAVYDNTFENSSLQEQNVQVEEILTDKISKSAKKDRVLKLFPNEKSNGRFAEFLKLIVGNQADFKKHFELEEKAPLQFSKDTYEEELEVLLAQIGDNYAELFLSAKKLYDSILLSGILTVTDVSTKAPLSASMIQRYNEHQMDLAQLKQFIRQKLSDKYNEVFSDVSKDGYAGYIDGKTNQEAFYKYLKGLLNKIEGSGYFLDKIEREDFLRKQRTFDNGSIPHQIHLQEMRAIIRRQAEFYPFLADNQDRIEKILTFRIPYYVGPLARGKSDFAWLSRKSADKITPWNFDEIVDKESSAEAFINRMTNYDLYLPNQKVLPKHSLLYEKFTVYNELTKVKYKTEQGKTAFFDANMKQEIFDGVFKVYRKVTKDKLMDFLEKEFDEFRIVDLTGLDKENKAFNASYGTYHDLRKILDKDFLDNSKNEKILEDIVLTLTLFEDREMIRKRLENYSDLLTKEQVKKLERRHYTGWGRLSAELIHGIRNKESRKTILDYLIDDGNSNRNFMQLINDDALSFKEEIAKAQVIGETDNLNQVVSDIAGSPAIKKGILQSLKIVDELVKIMGHQPENIVVEMARENQFTNQGRRNSQQRLKGLTDSIKEFGSQILKEHPVEHSQLQNDRLFLYYLQNGRDMYTGEELDIDYLSQYDIDHIIPQAFIKDNSIDNRVLTSSKENRGKSDDVPSKNVVRKMKSYWSKLLSAKLITQRKFDNLTKAERGGLTDDDKAGFIKRQLVETRQITKHVARILDERFHTETDENNKKIRQVKIVTLKSNLVSNFRKEFELYKVREINDYHHAHDAYLNAVIGKALLGVYPQLEPEFVYGDYPHFHGHKENKATAKKFFYSNIMNFFKKDDVRTDKNGEIIWKKDEHISNIKKVLSYPQVNIVKKVEEQTGGFSKESILPKGNSDKLIPRKTKKFYWDTKKYGGFDSPIVAYSILVIADIEKGKSKKLKTVKALVGVTIMEKMTFERDPVAFLERKGYRNVQEENIIKLPKYSLFKLENGRKRLLASARELQKGNEIVLPNHLGTLLYHAKNIHKVDEPKHLDYVDKHKDEFKELLDVVSNFSKKYTLAEGNLEKIKELYAQNNGEDLKELASSFINLLTFTAIGAPATFKFFDKNIDRKRYTSTTEILNATLIHQSITGLYETRIDLSKLGGD

SEQ ID NO: 241 - protein, 1345 aa, Streptococcus mutans
MKKPYSIGLDIGTNSVGWAVVTDDYKVPAKKMKVLGNTDKSHIKKNLLGALLFDSGNTAADRRLKRTARRRYTRRRNRILYLQEIFAEEMSKVDDSFFHRLEDSFLVTEDKRGERHPIFGNLEEEVKYHENFPTIYHLRQYLADNPEKVDLRLVYLALAHIIKFRGHFLIEGKFDTRNNDVQRLFQEFLAVYDNTFENSSLQEQNVQVEEILTDKISKSAKKDRVLKLFPNEKSNGRFAEFLKLIVGNQADFKKHFELEEKAPLQFSKDTYEEELEVLLAQIGDNYAELFLSAKKLYDSILLSGILTVTDVSTKAPLSASMIQRYNEHQMDLAQLKQFIRQKLSDKYNEVFSDVSKDGYAGYIDGKTNQEAFYKYLKGLLNKIEGSGYFLDKIEREDFLRKQRTFDNGSIPHQIHLQEMRAIIRRQAEFYPFLADNQDRIEKILTFRIPYYVGPLARGKSDFAWLSRKSADKITPWNFDEIVDKESSAEAFINRMTNYDLYLPNQKVLPKHSLLYEKFTVYNELTKVKYKTEQGKTAFFDANMKQEIFDGVFKVYRKVTKDKLMDFLEKEFDEFRIVDLTGLDKENKVFNASYGTYHDLCKILDKDFLDNSKNEKILEDIVLTLTLFEDREMIRKRLENYSDLLTKEQVKKLERRHYTGWGRLSAELIHGIRNKESRKTILDYLIDDGNSNRNFMQLINDDALSFKEEIAKAQVIGETDNLNQVVSDIAGSPAIKKGILQSLKIVDELVKIMGHQPENIVVEMARENQFTKQGRRNSQQRLKGLTDSIKEFGSQILKEHPVENSQLQNDRLFLYYLQNGRDMYTGEELDIDYLSQYDIDHIIPQAFIKDNSIDNRVLTSSKENRGKSDDVPSKDVVRKMKSYWSKLLSAKLITQRKFDNLTKAERGGLTDDDKAGFIKRQLVETRQITKHVARILDERFYTETDENNKKIRQVKIVTLKSNLVSNFRKEFELYKVREINDYHHAHDAYLNAVIGKALLGVYPQLEPEFVYGDYPHFHGHKENKATAKKFFYSNIMNFFKKDDVRTDKNGEIIWKKDEHISNIKKVLSYPQVNIVKKVEEQTGGFSKESILPKGNSDKLIPRKTKKFYWDTKKYGGFDSPIVAYSILVIADIEKGKSKKLKTVKALVGVTIMEKMTFERDPVAFLERKGYRNVQEENIIKLPKYSLFKLENGRKRLLASARELQKGNEIVLPNHLGTLLYHAKNIHKVDEPKHLDYVDKHKDEFKELLDVVSNFSKKYTLAEGNLEKIKELYAQNNGEDLKELASSFINLLTFTAIGAPATFKFFDKNIDRKRYTSTTEILNATLIHQSITGLYETRIDLSKLGGD

SEQ ID NO: 242 - protein, 1345 aa, Streptococcus mutans
MKKPYSIGLDIGTNSVGWAVVTDDYKVPAKKMKVLGNTDKSHIKKNLLGALLFDSGNTAADRRLKRTARRRYTRRRNRILYLQEIFAEEMSKVDDSFFHRLEDSFLVTEDKRGERHPIFGNLEEEVKYHENFPTIYHLRQYLADNPEKVDLRLVYLALAHIIKFRGHFLIEGKFDTRNNDVQRLFQEFLAVYDNTFENSSLQEQNVQVEEILTDKISKSAKKDRVLKLFPNEKSNGRFAEFLKLIVGNQADFKKHFELEEKAPLQFSKDTYEEELEVLLAQIGDNYAELFLSAKKLYDSILLSGILTVTDVSTKAPLSASMIQRYNEHQMDLAQLKQFIRQKLSDKYNEVFSDVSKDGYAGYIDGKTNQEAFYKYLKGLLNKIEGSGYFLDKIEREDFLRKQRTFDNGSIPHQIHLQEMRAIIRRQAEFYPFLADNQDRIEKILTFRIPYYVGPLARGKSDFAWLSRKSADKITPWNFDEIVDKESSAEAFINRMTNYDLYLPNQKVLPKHSLLYEKFTVYNELTKVKYKTEQGKTAFFDANMKQEIFDGVFKVYRKVTKDKLMDFLEKEFDEFRIVDLTGLDKENKAFNASYGTYHDLRKILDKDFLDNSKNEKILEDIVLTLTLFEDREMIRKRLENYSDLLTKEQVKKLERRHYTGWGRLSAELIHGIRNKESRKTILDYLIDDGNSNRNFMQLINDDALSFKEEIAKAQVIGETDNLNQVVSDIAGSPAIKKGILQSLKIVDELVKIMGHQPENIVVEMARENQFTNQGRRNSQQRLKGLTDSIKEFGSQILKEHPVENSQLQNDRLFLYYLQNGRDMYTGEELDIDYLSQYDIDHIIPQAFIKDNSIDNRVLTSSKENRGKSDDVPSKNVVRKMKSYWSKLLSAKLITQRKFDNLTKAERGGLTDDDKAGFIKRQLVETRQITKHVARILDERFHTETDENNKKIRQVKIVTLKSNLVSNFRKEFELYKVREINDYHHAHDAYLNAVIGKALLGVYPQLEPEFVYGDYPHFHGHKENKATAKKFFYSNIMNFFKKDDVRTDKNGEIIWKKDEHISNIKKVLSYPQVNIVKKVEEQTGGFSKESILPKGNSDKLIPRKTKKFYWDTKKYGGFDSPIVAYSILVIADIEKGKSKKLKTVKALVGVTIMEKMTFERDPVAFLERKGYRNVQEENIIKLPKYSLFKLENGRKRLLASARELQKGNEIVLPNHLGTLLYHAKNIHKVDEPKHLDYVDKHKDEFKELLDVVSNFSKKYTLAEGNLEKIKELYAQNNGEDLKELSSSFINLLTFTAIGAPAAFKFFDKNIDRKRYTSTTEILNATLIHQSITGLYETRIDLSKLGGD

SEQ ID NO: 243 - protein, 1345 aa, Streptococcus mutans
MKKPYSIGLDIGTNSVGWAVVTDDYKVPAKKMKVLGNTDKSHIKKNLLGALLFDSGNTAADRRLKRTARRRYTRRRNRILYLQEIFAEEMSKVDDSFFHRLEDSFLVTEDKRGERHPIFGNLEEEVKYHENFPTIYHLRQYLADNPEKVDLRLVYLALAHIIKFRGHFLIEGKFDTRNNDVQRLFQEFLAVYDNTFENSSLQEQNVQVEEILTDKISKSAKKDRVLKLFPNEKSNGRFAEFLKLIVGNQADFKKHFELEEKAPLQFSKDTYEEELEVLLAQIGDNYAELFLSAKKLYDSILLSGILTVTDVSTKAPLSASMIQRYNEHQMDLAQLKQFIRQKLSDKYNEVFSDVSKDGYAGYIDGKTNQEAFYKYLKGLLNKIEGSGYFLDKIEREDFLRKQRTFDNGSIPHQIHLQEMRAIIRRQAEFYPFLADNQDRIEKILTFRIPYYVGPLARGKSDFAWLSRKSADKITPWNFDEIVDKESSAEAFINRMTNYDLYLPNQKVLPKHSLLYEKFTVYNELTKVKYKTEQGKTAFFDANMKQEIFDGVFKVYRKVTKDKLMDFLEKEFDEFRIVDLTGLDKENKAFNASYGTYHDLRKILDKDFLDNSKNEKILEDIVLTLTLFEDREMIRKRLENYSDLLTKEQVKKLERRHYTGWGRLSAELIHGIRNKESRKTILDYLIDDGNSNRNFMQLINDDALSFKEEIAKAQVIGETDNLNQVVSDIAGSPAIKKGILQSLKIVDELVKIMGHQPENIVVEMARENQFTNQGRRNSQQRLKGLTDSIKEFGSQILKEHPVKHSQLQNDRLFLYYLQNGRDMYTGEELDIDYLSQYDIDHIIPQAFIKDNSIDNRVLTSSKENRGKSDDVPSKNVVRKMKSYWSKLLSAKLITQRKFDNLTKAERGGLTDDDKAGFIKRQLVETRQITKHVARILDERFHTETDENNKKIRQVKIVTLKSNLVSNFRKEFELYKVREINDYHHAHDAYLNAVIGKALLGVYPQLEPEFVYGDYPHFHGHKENKATAKKFFYSNIMNFFKKDDVRTDKNGEIIWKKDEHISNIKKVLSYPQVNIVKKVEEQTGGFSKESILPKGNSDKLIPRKTKKFYWDTKKYGGFDSPIVAYSILVIADIEKGKSKKLKTVKALVGVTIMEKMTFERDPVAFLERKGYRNVQEENIIKLPKYSLFKLENGRKRLLASARELQKGNEIVLPNHLGTLLYHAKNIHKVDEPKHLDYVDKHKDEFKELLDVVSNFSKKYTLAEGNLEKIKELYAQNNGEDLKELASSFINLLTFTAIGAPATFKFFDKNIDRKRYTSTTEILNATLIHQSITGLYETRIDLSKLGGD

SEQ ID NO: 244 - protein, 1345 aa, Streptococcus mutans
MKKPYSIGLDIGTNSVGWAVVTDDYKVPAKKMKVLGNTDKSHIKKNLLGALLFDSGNTAADRRLKRTARRRYTRRRNRILYLQEIFAEEMSKVDDSFFHRLEDSFLVTEDKRGERHPIFGNLEEEVKYHENFPTIYHLRQYLADNPEKVDLRLVYLALAHIIKFRGHFLIEGKFDTRNNDVQRLFQEFLAVYDNTFENSSLQEQNVQVEEILTDKISKSAKKDRVLKLFPNEKSNGRFAEFLKLIVGNQADFKKHFELEEKAPLQFSKDTYEEELEVLLAQIGDNYAELFLSAKKLYDSILLSGILTVTDVSTKAPLSASMIQRYNEHQMDLAQLKQFIRQKLSDKYNEVFSDVSKDGYAGYIDGKTNQEAFYKYLKGLLNKIEGSGYFLDKIEREDFLRKQRTFDNGSIPHQIHLQEMRAIIRRQAEFYPFLADNQDRIEKILTFRIPYYVGPLARGKSDFAWLSRKSADKITPWNFDEIVDKESSAEAFINRMTNYDLYLPNQKVLPKHSLLYEKFTVYNELTKVKYKTEQGKTAFFDANMKQEIFDGVFKVYRKVTKDKLMDFLEKEFDEFRIVDLTGLDKENKAFNASYGTYHDLRKILDKDFLDNSKNEKILEDIVLTLTLFEDREMIRKRLENYSDLLTKEQVKKLERRHYTGWGRLSAELIHGIRNKESRKTILDYLIDDGNSNRNFMQLINDDALSFKEEIAKAQVIGETDNLNQVVSDIAGSPAIKKGILQSLKIVDELVKIMGHQPENIVVEMARENQFTNQGRRNSQQRLKGLTDSIKEFGSQILKEHPVENSQLQNDRLFLYYLQNGRDMYTGEELDIDYLSQYDIDHIIPQAFIKDNSIDNRVLTSSKENRGKSDDVPSKNVVRKMKSYWSKLLSAKLITQRKFDNLTKAERGGLTDDDKAGFIKRQLVETRQITKHVARILDERFHTETDENNKKIRQVKIVTLKSNLVSNFRKEFELYKVREINDYHHAHDAYLNAVIGKALLGVYPQLEPEFVYGDYPHFHGHKENKATAKKFFYSNIMNFFKKDDVRTDKNGEIIWKKDEHISNIKKVLSYPQVNIVKKVEEQTGGFSKESILPKGNSDKLIPRKTKKFYWDTKKYGGFDSPIVAYSILVIADIEKGKSKKLKTVKALVGVTIMEKMTFERDPVAFLERKGYRNVQEENIIKLPKYSLFKLENGRKRLLASARELQKGNEIVLPNHLGTLLYHAKNIHKVDEPKHLDYVDKHKDEFKELLDVVSNFSKKYTLAEGNLEKIKELYAQNNGEDLKELASSFINLLTFTAIGAPATFKFFDKNIDRKRYTSTTEILNATLIHQSITGLYETRIDLSKLGGD

SEQ ID NO: 245 - protein, 1345 aa, Streptococcus mutans
MKKPYSIGLDIGTNSVGWAVVTDDYKVPAKKMKVLGNTDKSHIKKNLLGALLFDSGNTAADRRLKRTARRRYTRRRNRILYLQEIFAEEMSKVDDSFFHRLEDSFLVTEDKRGERHPIFGNLEEEVKYHENFPTIYHLRQYLADNPEKVDLRLVYLALAHIIKFRGHFLIEGKFDTRNNDVQRLFQEFLAVYDNTFENSSLQEQNVQVEEILTDKISKSAKKDRVLKLFPNEKSNGRFAEFLKLIVGNQADFKKHFELEEKAPLQFSKDTYEEELEVLLAQIGDNYAELFLSAKKLYDSILLSGILTVTDVSTKAPLSASMIQRYNEHQMDLVQLKQFIRQKLSDKYNEVFSDVSKDGYAGYIDGKTNQEAFYKYLKGLLNKIEGSGYFLDKIEREDFLRKQRTFDNGSIPHQIHLQEMRAIIRRQAEFYPFLADNQDRIEKILTFRIPYYVGPLARGKSDFAWLSRKSADKITPWNFDEIVDKESSAEAFINRMTNYDLYLPNQKVLPKHSLLYEKFTVYNELTKVKYKTEQGKTAFFDANMKQEIFDGVFKVYRKVTKDKLMDFLEKEFDEFRIVDLTGLDKENKAFNASYGTYHDLRKILDKDFLDNSKNEKILEDIVLTLTLFEDREMIRKRLENYSDLLTKEQVKKLERRHYTGWGRLSAELIHGIRNKESRKTILDYLIDDGNSNRNFMQLINDDALSFKEEIAKAQVIGETDNLNQVVSDIAGSPAIKKGILQSLKIVDELVKIMGHQPENIVVEMARENQFTNQGRRNSQQRLKGLTDSIKEFGSQILKEHPVEHSQLQNDRLFLYYLQNGRDMYTGEELDIDYLSQYDIDHIIPQAFIKDNSIDNRVLTSSKENRGKSDDVPSKNVVRKMKSYWSKLLSAKLITQRKFDNLTKAERGGLTDDDKAGFIKRQLVETRQITKHVARILDERFHTETDENNKKIRQVKIVTLKSNLVSNFRKEFELYKVREINDYHHAHDAYLNAVIGKALLGVYPQLEPEFVYGDYPHFHGHKENKATAKKFFYSNIMNFFKKDDVRTDKNGEIIWKKDEHISNIKKVLSYPQVNIVKKVEEQTGGFSKESILPKGNSDKLIPRKTKKFYWDTKKYGGFDSPIVAYSILVIADIEKGKSKKLKTVKALVGVTIMEKMTFERDPVAFLERKGYRNVQEENIIKLPKYSLFKLENGRKRLLASARELQKGNEIVLPNHLGTLLYHAKNIHKVDEPKHLDYVDKHKDEFKELLDVVSNFSKKYTLAEGNLEKIKELYAQNNGEDLKELASSFINLLTFTAIGAPATFKFFDKNIDRKRYTSTTEILNATLIHQSITGLYETRIDLSKLGGD

SEQ ID NO: 246 - protein, 1359 aa, Streptococcus mutans
MKKPYSIGLDIGTNSVGWAVVTDDYKVPAKKMKVLGNTDKSHIKKNLLGALLFDSGNTAEDRRLKRTARRRYTRRRNRILYLQEIFAEEMMQVDESFFQRLDDSFLVEEDKRGSRYPIFGTLKEEKKYHKEFKTIYHLREKLANSTEKADLRLVYLSLAHMIKFRGHFLIEGQLKAENTNVQALFKDFVEVYDKTVEESHLSEMTVDALSILTEKVSKSRRLENLVECYPTEKKNTLFGNLIALSLGLQPNFKTNFQLSEDAKLQFSKDTYEEDLEGLLGEIGDEYADLFASAKNLYDAILLSGILAVDDNTTKAPLSASMVKRYKEHKEELAAFKRFIKEKLPKKYEEIFKDDTKNGYAGYVGADKKLRKRSGKLATEEEFYKYVKGILNKVEGADVWLDKIDREDFLRKQRTFDNGSIPHQIHLQEMHAILRRQGEHYPFLKENQDKIEKILTFRIPYYVGPLVRKGSRFAWAEYKADEKITPWNFDDILDKEKSAEKFITRMTLNDLYLPEEKVLPKHSLLYETFTVYNELTKVKYVNEQGEAKFFDANMKQEIFDHVFKENRKVTKDKLLNYLNKEFEEFRIVNLTGLDKENKVFNSSLGTYHDLRKILNKSFLDNKENEQIIEDIIQTLTLFEDREMIRQRLQKYSDIFTKAQLKKLERRHYTGWGRLSYKLINGIRDKQSNKTILGYLIDDGYSNRNFMQLINDDALSFKEEIAKAQVIGEMDGLNQVVSDIAGSPAIKKGILQSLKIVDELVKVMGHNPANIVIEMARENQTTAKGRRSSQKRYKRLEEAIKNLDHDLNHKILKEHPTDNQALQNDRLFLYYLQNGRDMYTEDPLDINRLSDYDIDHIIPQAFIKDNSIDNRVLTRSDKNRGKSDDVPSEEVVHKMKPFWSKLLSAKLITQRKFDNLTKAERGGLTDDDKAGFIKRQLVETRQITKHVARILDERFNTETDENNKKIRQVKIVTLKSNLVSNFRKEFELYKVREINDYHHAHDAYLNAVIGKALLGVYPQLEPEFVYGDYPHFHGHKENKATAKKFFYSNIMNFFKKGDVRTDKNGEIIWKKDEHISNIKKVLSYPQVNIVKKVEEQTGGFSKESILPKGNSDKLIPRKTKKFYWDTKKYGGFDSPIVAYSILVIADIEKGKSKKLKTVKALVGVTIMEKMTFERDPVAFLERKGYRNVQEENIIKLPKYSLFKLENGRKRLLASARELQKGNEIVLPNHLETLLYHAKNIHKVDEPKHLDYVDKHKDEFKELLDVVSNFSKKYTLAEGNLEKIKELYAQNNGEDLKELASSFINLLTFTAIGAPAAFKFFDKNIDRKRYTSTTEILNATLIHQSITGLYETRIDLNKLGGD

SEQ ID NO: 247 - protein, 1355 aa, Streptococcus mutans
MKKPYSIGLDIGTNSVGWAVVTDDYKVPAKKMKVLGNTDKSHIKKNLLGALLFDSGNTAEDRRLKRTARRRYTRRRNRILYLQEIFAEEMSKVDDSFFHRLDESFLTDDDKNFDSHPIFGNKAEEDAYHQKFPTIYHLRKHLADSTEKADLRLVYLALAHMIKFRGHFLIEGELNAENTDVQKLFADFVGVYDRTFDDSHLSEITVDASSILTEKISKSRRLEKLINNYPKEKKNTLFGNLIALSLGLQPNFKTNFKLSEDAKLQFSKDTYEEDLEELLGKIGDDYADLFTLAKNLYDAILLSGILTADDSSTKAPLSASMIKRYAEHHEDLEKLKEFIKANKPELYHDIFKDETKNGYAGYIENGVKQDEFYKYLKNTLSKITGSDYFLDQIEREDFLRKQRTFDNGSIPHQIHLQEMHAILRRQGDYYPFLKENQDRIEKILTFRIPYYVGPLARKNSRFAWAEYHSDEAVTPWNFDQVIDKESSAQAFIEHMTNNDLYLPNEKVLPKHSPLYEKYTVYNELTKIKYVTEIGEAKFFDANLKQEIFDGLFKHERKVTKKKLRTFLDKNFDEFRIVDIQGLDKETETFNASYATYQDLLKVIKDKVFMDNPENAEILENIVLTLTLFEDREMIKQRLAKYADVFDKKVIDQLARRHYTGWGRLSAKLLNGIRDKQSCKTIMDYLIDDAQSNRNLMQLITDDNLTFKDDIVKAQYVDNSDDLHQVVQSLAGSPAIKKGILQSLKIVDELVKVMGKEPEQIVVEMARENQTTAKGRRNSQQRYKRLKEAIKSLDRDLNHKILKEHPTDNQALQNNRLFLYYLQNGRDMYTGESLDINRLSDYDIDHVIPQAFIKDNSIDNRVLTSSKANRGKSDDVPSEDVVNRMRPFWNKLLSSGLISQRKYNNLTKKELTLDDKAGFIKRQLVETRQITKHVARMLDERFNKEFDDNNKRIRRVKIVTLKSNLVSSFRKEFELYKVREINDYHHAHDAYLNAVVVKALLVKYPKLEPEFVYGEYPKYNSYRERKTATQKMFFYSNIMNMFKSKVKLADDQIVERPMIEVNDETGEIAWDKTKHITTVKKVLSYPQVNIVKKVEEQTIGQNGGLFDDNPKSPLEVIPSKLVPLKKALNPEKYGGYQKPTTAYPILLIVDTKQLIPISVMDKKRFEQNPVKFLKDKGYQQIEKNNFVKLPKYTLVDIGNGIKRLWASSKEVHKGNQLVVSKKSQDLLYHAHHLDNDYSNEYVKNHYQQFDILFNEITSFSKKCKLGKEHIQKIEEAYSKERDFASIEELADGFIKLLGFTQLGATSPFSFLGIKLNQKQYTGKKDYLLPCMEATLIHQSITGLYETRIDLSKLGGD

SEQ ID NO: 248 - protein, 1355 aa, Streptococcus mutans
MKKPYSIGLDIGTNSVGWAVVTDDYKVPAKKMKVLGNTDKSHIKKNLLGALLFDSGNTAEDRRLKRTARRRYTRRRNRILYLQEIFAEEMSKVDDSFFHRLDESFLTDDDKNFDSHPIFGNKAEEDAYHQKFPTIYHLRKHLADSTEKADLRLVYLALAHMIKFRGHFLIEGELNAENTDVQKLFADFVGVYDRTFDDSHLSEITVDASSILTEKISKSRRLEKLINNYPKEKKNTLFGNLIALSLGLQPNFKTNFKLSEDAKLQFSKDTYEEDLEELLGKIGDDYADLFTLAKNLYDAILLSGILTADDSSTKAPLSASMIKRYAEHHEDLEKLKEFIKANKPELYHDIFKDETKNGYAGYIENGVKQDEFYKYLKNTLSKITGSDYFLDQIEREDFLRKQRTFDNGSIPHQIHLQEMHAILRRQGDYYPFLKENQDRIEKILTFRIPYYVGPLARKNSRFAWAEYHSDEAVTPWNFDQVIDKESSAQAFIEHMTNNDLYLPNEKVLPKHSPLYEKYTVYNELTKIKYVTEIGEAKFFDANLKQEIFDGLFKHERKVTKKKLRTFLDKNFDEFRIVDIQGLDKETETFNASYATYQDLLKVIKDKVFMDNPENAEILENIVLTLTLFEDREMIKQRLAKYADVFDKKVIDQLARRHYTGWGRLSAKLLNGIRDKQSCKTIMDYLIDDAQSNRNLMQLITDDNLTFKDDIVKAQYVDNSDDLHQVVQSLAGSPAIKKGILQSLKIVDELVKVMGKEPEQIVVEMARENQTTAKGRRNSQQRYKRLKEAIKSLDRDLNHKILKEHPTDNQALQNNRLFLYYLQNGRDMYTGESLDINRLSDYDIDHVIPQAFIKDNSIDNRVLTSSKANRGKSDDVPSEDVVNRMRPFWNKLLSSGLISQRKYNNLTKKELTLDDKAGFIKRQLVETRQITKHVARMLDERFNKEFDDNNKRIRRVKIVTLKSNLVSSFRKEFELYKVREINDYHHAHDAYLNAVVVKALLVKYPKLEPEFVYGEYLKYNSYRERKTATQKMFFYSNIMNMFKSKVKLADDQIVERPMIEVNDETGEIAWDKTKHITTVKKVLSYPQVNIVKKVEEQTIGQNGGLFDDNPKSPLEVIPSKLVPLKKALNPEKYGGYQKPTTAYPILLIVDTKQLIPISVMDKKRFEQNPVKFLKDKGYQQIEKNNFVKLPKYTLVDIGNGIKRLWASSKEVHKGNQLVVSKKSQDLLYHAHHLDNDYSNEYVKNHYQQFDILFNEITSFSKKCKLGKEHIQKIEEAYSKERDFASIEELADGFIKLLGFTQLGATSPFSFLGIKLNQKQYTGKKDYLLPCMEATLIHQSITGLYETRIDLSKLGGD

SEQ ID NO: 249 - protein, 1345 aa, Streptococcus mutans
MKKPYSIGLDIGTNSVGWAVVTDDYKVPAKKMKVLGNTDKSHIKKNLLGALLFDSGNTAEDRRLKRTARRRYTRRRNRILYLQEIFSEEMDKVDDSFFHRLEDSFLVTEDKRGERHPIFGNLEEEVKYHENFPTIYHLRQYLADNPEKVDLRLVYLALAHIIKFRGHFLIEGKFDTRNNDVQRLFQEFLAVYDNTFENSSLQEQNVQVEEILTDKISKSAKKDRVLKLFPNEKSNGRFAEFLKLIVGNQADFKKHFELEEKAPLQFSKDTYEEELEVLLAQIGDNYAELFLSAKKLYDSILLSGILTVTDVSTKAPLSASMIQRYNEHQMDLAQLKQFIRQKLSDKYNEVFSDVSKDGYAGYIDGKTNQEAFYKYLKGLLNKIEGSGYFLDKIEREDFLRKQRTFDNGSIPHQIHLQEMRAIIRRQAEFYPFLADNQDRIEKILTFRIPYYVGPLARGKSDFAWLSRKSADKITPWNFDEIVDKESSAEAFINRMTNYDLYLPNQKVLPKHSLLYEKFTVYNELTKVKYKTEQGKTAFFDANMKQEIFDGVFKVYRKVTKDKLMDFLEKEFDEFRIVDLTGLDKENKVFNASYGTYHDLCKILDKDFLDNSKNEKILEDIVLTLTLFEDREMIRKRLENYSDLLTKEQVKKLERRHYTGWGRLSAELIHGIRNKESRKTILDYLIDDGNSNRNFMQLINDDALSFKEEIAKAQVIGETDNLNQVVSDIAGSPAIKKGILQSLKIVDELVKIMGHQPENIVVEMARENQFTKQGRRNSQQRLKGLTDSIKEFGSQILKEHPVENSQLQNDRLFLYYLQNGRDMYTGEELDIDYLSQYDIDHIIPQAFIKDNSIDNRVLTSSKENRGKSDDVPSKDVVRKMKSYWSKLLSAKLITQRKFDNLTKAERGGLTDDDKAGFIKRQLVETRQITKHVARILDERFYTETDENNKKIRQVKIVTLKSNLVSNFRKEFELYKVREINDYHHAHDAYLNAVIGKALLGVYPQLEPEFVYGDYPHFHGHKENKATAKKFFYSNIMNFFKKDDVRTDKNGEIIWKKDEHISNIKKVLSYPQVNIVKKVEEQTGGFSKESILPKGNSDKLIPRKTKKFYWDTKKYGGFDSPIVAYSILVIADIEKGKSKKLKTVKALVGVTIMEKMTFERDPVAFLERKGYRNVQEENIIKLPKYSLFKLENGRKRLLASARELQKGNEIVLPNHLGTLLYHAKNIHKVDEPKHLDYVDKHKDEFKELLDVVSNFSKKYTLAEGNLEKIKELYAQNNGEDLKELASSFINLLTFTAIGAPATFKFFDKNIDRKRYTSTTEILNATLIHQSITGLYETRIDLSKLGGD

SEQ ID NO: 250 - protein, 1345 aa, Streptococcus mutans
MKKPYSIGLDIGTNSVGWAVVTDDYKVPAKKMKVLGNTDKSHIKKNLLGALLFDSGNTAEDRRLKRTARRRYTRRRNRILYLQEIFSEEMGKVDDSFFHRLDESFLTDDDKNFDSHPIFGNKAEEDAYHQKFPTIYHLRKHLADSTEKADLRLVYLALAHMIKFRGHFLIEGELNAENTDVQKLFADFVGVYDRTFDDSHLSEITVDASSILTEKISKSRRLEKLINNYPKEKKNTLFGNLIALSLGLQPNFKTNFKLSEDAKLQFSKDTYEEELEVLLAQIGDNYAELFLSAKKLYDSILLSGILTVTDVSTKAPLSASMIQRYNEHQMDLAQLKQFIRQKLSDKYNEVFSDVSKDGYAGYIDGKTNQEAFYKYLKGLLNKIEGSGYFLDKIEREDFLRKQRTFDNGSIPHQIHLQEMRAIIRRQAEFYPFLADNQDRIEKILTFRIPYYVGPLARGKSDFAWLSRKSADKITPWNFDEIVDKESSVEAFINRMTNYDLYLPNQKVLPKHSLLYEKFTVYNELTKVKYKTEQGKTAFFDANMKQEIFDGVFKVYRKVTKDKLMDFLEKEFDEFRIVDLTGLDKENKAFNASYGTYHDLRKILDKDFLDNSKNEKILEDIVLTLTLFEDREMIRKRLKNYSDLLTKEQLKKLERRHYTGWGRLSAELIHGIRNKESRKTILDYLIDDGNSNRNFMQLINDDALSFKEEIAKAQVIGETDNLNQVVSDIAGSPAIKKGILQSLKIVDELVKIMGHQPENIVVEMARENQFTNQGRRNSQQRLKGLTDSIKEFGSQILKEHPVENSQLQNDRLFLYYLQNGRDMYTGEELDIDYLSQYDIDHIIPQAFIKDNSIDNRVLTSSKENRGKSDDVPSKDVVRKMKSYWSKLLSAKLITQRKFDNLTKGERGGLTDDDKAGFIKRQLVETRQITKHVARILDERFNTETDENNKKIRQVKIVTLKSNLVSNFRKEFELYKVREINDYHHAHDAYLNAVIGKALLGVYPQLEPEFVYGDYPHFHGHKENKATAKKFFYSNIMNFFKKDDVRTDKNGEIIWKKDEYISNIKKVLSYPQVNIVKKVEEQTGGFSKESILPKGDSDKLIPRKTKKFYWDTKKYGGFDSPIVAYSILVIADIEKGKSKKLKTVKALVGVTIMEKMTFERDPVAFLERKGYRNVQEENIIKLPKYSLFKLENGRKRLLASARELQKGNEIVLPNHLGTLLYHAKNIHKVDEPKHLDYVDKHKDEFKELLDVVSNFSKKYTLAEGNLEKIKELYAQNNGEDLKELASSFINLLTFTAIGAPATFKFFDKNIDRKRYTSTTEILNATLIHQSITGLYETRIDLSKLGGD

SEQ ID NO: 251 - protein, 1345 aa, Streptococcus mutans
MKKPYSIGLDIGTNSVGWAVVTDDYKVPAKKMKVLGNTDKSHIKKNLLGALLFDSGNTAEDRRLKRTARRRYTRRRNRILYLQEIFSEEMGKVDDSFFHRLDESFLTDDDKNFDSYPIFGNKAEEDAYHQKFPTIYHLRKHLADSTEKADLRLVYLALAHMIKFRGHFLIEGELNAENTDVQKLFADFVGVYDRTFDDSHLSEITVDASSILTEKISKSRRLEKLINNYPKEKKNTLFRNLVALSLGLQPNFKTNFKLSEDAKLQFSKDTYEEDLEELLGKIGDDYADLFTLAKNLYDAILLSGILTADDSSTKAPLSASMIKRYAEHHEDLEKLKEFIKANKPELYHDIFKDETKNGYAGYIENGVKQDEFYKYLKNTLSKIAGSDYFLDKIEREDFLRKQRTFDNGSIPHQIHLQEMHAILRRQGDYYPFLKENQDRIEKILTFRIPYYVGPLARGKSDFAWLSRKSADKITPWNFDEIVDKESSVEAFINRMTNYDLYLPNQKVLPKHSLLYEKFTVYNELTKVKYKTEQGKTAFFDANMKQEIFDGVFKVYRKVTKDKLMDFLEKEFDEFRIVDLTGLDKENKAFNASYGTYHDLRKILDKDFLDNSKNEKILEDIVLTLTLFEDREMIRKRLKNYSDLLTKEQLKKLERRHYTGWGRLSAELIHGIRNKESRKTILDYLIDDGNSNRNFMQLINDDALSFKEEIAKAQVIGETDNLNQVVSDIAGSPAIKKGILQSLKIVDELVKIMGHQPENIVVEMARENQFTNQGRRNSQQRLKGLTDSIKEFGSQILKEHPVENSQLQNDRLFLYYLQNGRDMYTGEELDIDYLSQYDIDHIIPQAFIKDNSIDNRVLTSSKENRGKSDDVPSKDVVRKMKSYWSKLLSAKLITQRKFDNLTKGERGGLTDDDKAGFIKRQLVETRQITKHVARILDERFNTETDENNKKIRQVKIVTLKSNLVSNFRKEFELYKVREINDYHHAHDAYLNAVIGKALLGVYPQLEPEFVYGDYPHFHGHKENKATAKKFFYSNIMNFFKKDDVRTDKNGEIIWKKDEYISNIKKVLSYPQVNIVKKVEEQTGGFSKESILPKGDSDKLIPRKTKKFYWDTKKYGGFDSPIVAYSILVIADIEKGKSKKLKTVKALVGVTIMEKMTFERDPVAFLERKGYRNVQEENIIKLPKYSLFKLENGRKRLLASARELQKGNEIVLPNHLGTLLYHAKNIHKVDEPKHLDYVDKHKDEFKELLDVVSNFSKKYTLAEGNLEKIKELYAQNNGEDLKELASSFINLLTFTAIGAPATFKFFDKNIDRKRYTSTTEILNATLIHQSITGLYETRIDLSKLGGD

SEQ ID NO: 252 - protein, 1345 aa, Streptococcus mutans
MKKPYSIGLDIGTNSVGWAVVTDDYKVPAKKMKVLGNTDKSHIKKNLLGALLFDSGNTAEDRRLKRTARRRYTRRRNRILYLQEIFSEEMGKVDDSFFHRLEDSFLVTEDKRGECHPIFGNLEEEVKYHENFPTIYHLRQYLADNPEKTDLRLVYLALAHIIKFRGHFLIEGKFDTRNNDVQRLFQEFLAVYDNTFENSSLQEQNVQVEEILTDKISKSAKKDRVLKLFPNEKSNGRFAEFLKLIVGNQADFKKHFELEEKAPLQFSKDTYEEELEVLLAQIGDNYAELFLSAKKLYDSILLSGILTVTDVSTKAPLSASMIQRYNEHQMDLTQLKQFIRQKLSDKYNEVFSDVSKDGYAGYIDGKTNQEAFYKYLKGLLNKIEGNGYFLDKIEREDFLRKQRTFDNGSIPHQIHLQEMRAIIRRQAEFYPFLADNQDRIEKILTFRIPYYVGPLARGKSDFAWLSRKSADKITPWNFDEIVDKESSAEAFINRMTNYDLYLPNQKVLPKHSLLYEKFTVYNELTKVKYKTEQGKTAFFDANMKQEIFDGVFKVYRKVTKDKLMDFLEKEFDEFRIVDLTGLDKENKAFNASYGTYHDLRKILDKDFLDNSKNEKILEDIVLTLTLFEDREMIRKRLENYSDLLTKEQVKKLERRHYTGWGRLSAELIHGIRNKESRKTLLDYLIDDGNSNRNFMQLINDDALSFKEEIAKAQVIGETDNLNQVVSDIAGSPAIKKGILQSLKIVDELVKIMGHQPENIVVEMARENQFTNQGRRNSQQRLKGLTDSIKEFGSQILKEHPVENSQLQNDRLFLYYLQNGRDMYTGEELDIDYLSQYDIDHIIPQAFIKDNSIDNRVLTSSKENRGKSDDVPSKDVVRKMKPYWSKLLSAKLITQRKFDNLTKAERGGLTDDDKAGFIKRQLVETRQITKHVARILDERFNTETDENNKKIRQVKIVTLKSNLVSNFRKEFELYKVREINDYHHAHDAYLNAVIGKALLGVYPQLEPEFVYGDYPHFHGHEENKATAKKFFYSNIMNFFKKDDVRTDKNGEIIWKKDEHISNIKKVLSYPQVNIVKKVEEQTGGFSKESILPKGNSDKLIPRKTKKFYWDTKKYGGFDSPIVAYSILVIADIEKGKSKKLKTVKALVGVTIMEKMTFERDPVAFLERKGYRNVQEENIIKLPKYSLFKLENGRKRLLASARELQKGNEIVLPNHLGTLLYHAKNIHKVDEPKHLDYVDKHKDEFKELLDVVSNFSKKYTLAEGNLEKIKELYAQNNGEDLKELSSSFINLLTFTAIGAPAAFKFFDKNIDRKRYTSTTEILNATLIHQSITGLYETRIDLSKLGGD

SEQ ID NO: 253 - protein, 1344 aa, Streptococcus mutans
MKKPYSIGLDIGTNSVGWAVVTDDYKVPAKKMKVLGNTDKSHIKKNLLGALLFDSGNTAEDRRLKRTARRRYTRRRNRILYLQEIFSEEMGKVDDSFFHRLEDSFLVTEDKRGERHPIFGNLEEEVKYHENFPTIYHLRQYLADNPEKTDLRLVYLALAHIIKFGGHFLIEGKFDTRNNDVQRLFQEFLAVYDNTFENSSLQEQNVQVEEILTDKISKSAKKDRVLKLFPNEKSNGRFAEFLKLIVGNQADFKKHFELEEKAPLQFSKDIYEEELEVLLAQIGDNYAELFLSAKKLYDSILLSGILTVTDVSTKAPLSASMIQRYNEHQMDLAQLKQFIRQKLSDKYNEVFSDVSKDGYAGYIDGKTNQEAFYKYLKGLLNKIEGSGYFLDKIEREDFLRKQRTFDNGSIPHQIHLQEMRAIIRRQAEFYPFLADNQDRIEKILTFRIPYYVGPLARGKSDFAWLSRKSADKITPWNFDEIVDKESSVEAFINRMTNYDLYLPNQKVLPKHSLLYEKFTVYNELTKVKYKTEQGKTAFFDANMKQEIFDGVFKVYRKVTKDKLMDFLEKEFDEFRIVDLTGLDKENKAFNASYGTYHDLRKILDKDFLDNSKNEKILEDIVLTLTLFEDREMIRKRLKNYSDLLTKEQLKKLERRHYTGWGRLSAELIHGIRNKESRKTILDYLIDDGNSNRNFMQLINDDALSFKEEIAKAQVIGETDNLNQVVSDIAGSPAIKKGILQSLKIVDELVKIMGHQPENIVVEMARENQFTNQGRRNSQQRLKGLTDSIKEFGSQILKEHPVENSQLQNDRLFLYYLQNGRDMYTGEELDIDYLSQYDIDHIIPQAFIKDNSIDNRVLTSSKENRGKSDDVPSKNVVRKMKSYWSKLLSAKLITQRKFDNLTKAERGGLTDDDKAGFIKRQLVETRQITKHVARILDERFHTETDENNKKIRQVKIVTLKSNLVSNFRKEFELYKVREINDYHHAHDAYLNAVIGKALLGVYPQLEPEFVYGDYPHFHGHKENKATAKKFFYSNIMNFFKKDDVRTDKNGEIIWKKDEHISNIKKVLSYPQVNIVKKVEEQTGGFSKESILPKGNSDKLIPRKTKKFYWDTKKYGGFDSPIVAYSILVIADIEKGKSKKLKTVKALVGVTIMEKMTFERDPVAFLERKGYRNVQEENIIKLPKYSLFKLENGRKRLLASARELQKGNEIVLPNHLGTLLYHAKNIHKVDEPKHLDYVDKHKDEFKELLDVVSNFSKKYTLAEGNLEKIKELYAQNNGEDLKELASSFINLLTFTAIGAPATFKFFDKNIDRKRYTSTTEILNATLIHQSITGLYETRIDLSKLGG

SEQ ID NO: 254 - protein, 1345 aa, Streptococcus mutans
MKKPYSIGLDIGTNSVGWAVVTDDYKVPAKKMKVLGNTDKSHIKKNLLGALLFDSGNTAEDRRLKRTARRRYTRRRNRILYLQEIFSEEMGKVDDSFFHRLEDSFLVTEDKRGERHPIFGNLEEEVKYHENFPTIYHLRQYLADNPEKTDLRLVYLALAHIIKFRGHFLIEGKFDTRNNDVQRLFQEFLAVYDNTFENSSLQEQNVQVEEILTDKISKSAKKDRVLKLFPNEKSNGRFAEFLKLIVGNQADFKKHFELEEKAPLQFSKDIYEEELEVLLAQIGDNYAELFLSAKKLYDSILLSGILTVTDVSTKAPLSASMIQRYNEHQMDLAQLKQFIRQKLSDKYNEVFSDVSKDGYAGYIDGKTNQEAFYKYLKGLLNKIEGSGYFLDKIEREDFLRKQRTFDNGSIPHQIHLQEMRAIIRRQAEFYPFLADNQDRIEKILTFRIPYYVGPLARGKSDFAWLSRKSADKITPWNFDEIVDKESSVEAFINRMTNYDLYLPNQKVLPKHSLLYEKFTVYNELTKVKYKTEQGKTAFFDANMKQEIFDGVFKVYRKVTKDKLMDFLEKEFDEFRIVDLTGLDKENKAFNASYGTYHDLRKILDKDFLDNSKNEKILEDIVLTLTLFEDREMIRKRLKNYSDLLTKEQLKKLERRHYTGWGRLSAELIHGIRNKESRKTILDYLIDDGNSNRNFMQLINDDALSFKEEIAKAQVIGETDNLNQVVSDIAGSPAIKKGILQSLKIVDELVKIMGHQPENIVVEMARENQFTNQGRRNSQQRLKGLTDSIKEFGSQILKEHPVENSQLQNDRLFLYYLQNGRDMYTGEELDIDYLSQYDIDHIIPQAFIKDNSIDNRVLTSSKENRGKSDDVPSKDVVRKMKSYWSKLLSAKLITQRKFDNLTKAERGGLTDDDKAGFIKRQLVETRQITKHVARILDERFNTETDENNKKIRQVKIVTLKSNLVSNFRKEFELYKVREINDYHHAHDAYLNAVIGKALLGVYPQLEPEFVYGDYPHFHGHKENKATAKKFFYSNIMNFFKKDDVRTDKNGEIIWKKDEHISNIKKVLSYPQVNIVKKVEEQTGGFSKESILPKGNSDKLIPRKTKKFYWDTKKYGGFDSPIVAYSILVIADIEKGKSKKLKTVKALVGVTIMEKMTFERDPVAFLERKGYRNVQEENIIKLPKYSLFKLENGRKRLLASARELQKGNEIVLPNHLGTLLYHAKNIHKVDEPKHLDYVDKHKDEFKELLDVVSNFSKKYTLAEGNLEKIKELYAQNNGEDLKELASSFINLLTFTAIGAPATFKFFDKNIDRKRYTSTTEILNATLIHQSITGLYETRIDLNKLGGD

SEQ ID NO: 255 - protein, 1345 aa, Streptococcus mutans
MKKPYSIGLDIGTNSVGWAVVTDDYKVPAKKMKVLGNTDKSHIKKNLLGALLFDSGNTAEDRRLKRTARRRYTRRRNRILYLQEIFSEEMGKVDDSFFHRLEDSFLVTEDKRGERHPIFGNLEEEVKYHENFPTIYHLRQYLADNPEKTDLRLVYLALAHIIKFRGHFLIEGKFDTRNNDVQRLFQEFLAVYDNTFENSSLQEQNVQVEEILTDKISKSAKKDRVLKLFPNEKSNGRFAEFLKLIVGNQADFKKHFELEEKAPLQFSKDIYEEELEVLLAQIGDNYAELFLSAKKLYDSILLSGILTVTDVSTKAPLSASMIQRYNEHQMDLAQLKQFIRQKLSDKYNEVFSDVSKDGYAGYIDGKTNQEAFYKYLKGLLNKIEGSGYFLDKIEREDFLRKQRTFDNGSIPHQIHLQEMRAIIRRQAEFYPFLADNQDRIEKILTFRIPYYVGPLARGKSDFAWLSRKSADKITPWNFDEIVDKESSVEAFINRMTNYDLYLPNQKVLPKHSLLYEKFTVYNELTKVKYKTEQGKTAFFDANMKQEIFDGVFKVYRKVTKDKLMDFLEKEFDEFRIVDLTGLDKENKAFNASYGTYHDLRKILDKDFLDNSKNEKILEDIVLTLTLFEDREMIRKRLKNYSDLLTKEQLKKLERRHYTGWGRLSAELIHGIRNKESRKTILDYLIDDGNSNRNFMQLINDDALSFKEEIAKAQVIGETDNLNQVVSDIAGSPAIKKGILQSLKIVDELVKIMGHQPENIVVEMARENQFTNQGRRNSQQRLKGLTDSIKEFGSQILKEHPVENSQLQNDRLFLYYLQNGRDMYTGEELDIDYLSQYDIDHIIPQAFIKDNSIDNRVLTSSKENRGKSDDVPSKNVVRKMKSYWSKLLSAKLITQRKFDNLTKAERGGLTDDDKAGFIKRQLVETRQITKHVARILDERFHTETDENNKKIRQVKIVTLKSNLVSNFRKEFELYKVREINDYHHAHDAYLNAVIGKALLGVYPQLEPEFVYGDYPHFHGHKENKATAKKFFYSNIMNFFKKDDVRTDKNGEIIWKKDEHISNIKKVLSYPQVNIVKKVEEQTGGFSKESILPKGNSDKLIPRKTKKFYWDTKKYGGFDSPIVAYSILVIADIEKGKSKKLKTVKALVGVTIMEKMTFERDPVAFLERKGYRNVQEENIIKLPKYSLFKLENGRKRLLASARELQKGNEIVLPNHLGTLLYHAKNIHKVDEPKHLDYVDKHKDEFKELLDVVSNFSKKYTLAEGNLEKIKELYAQNNGEDLKELASSFINLLTFTAIGAPATFKFFDKNIDRKRYTSTTEILNATLIHQSITGLYETRIDLSKLGGD

SEQ ID NO: 256 - protein, 1345 aa, Streptococcus mutans
MKKPYSIGLDIGTNSVGWAVVTDDYKVPAKKMKVLGNTDKSHIKKNLLGALLFDSGNTAEDRRLKRTARRRYTRRRNRILYLQEIFSEEMGKVDDSFFHRLEDSFLVTEDKRGERHPIFGNLEEEVKYHENFPTIYHLRQYLADNPEKTDLRLVYLALAHIIKFRGHFLIEGKFDTRNNDVQRLFQEFLAVYDNTFENSSLQEQNVQVEEILTDKISKSAKKDRVLKLFPNEKSNGRFAEFLKLIVGNQADFKKHFELEEKAPLQFSKDIYEEELEVLLAQIGDNYAELFLSAKKLYDSILLSGILTVTDVSTKAPLSASMIQRYNEHQMDLAQLKQFIRQKLSDKYNEVFSDVSKDGYAGYIDGKTNQEAFYKYLKGLLNKIEGSGYFLDKIEREDFLRKQRTFDNGSIPHQIHLQEMRAIIRRQAEFYPFLADNQDRIEKILTFRIPYYVGPLARGKSDFAWLSRKSADKITPWNFDEIVDKESSVEAFINRMTNYDLYLPNQKVLPKHSLLYEKFTVYNELTKVKYKTEQGKTAFFDANMKQEIFDGVFKVYRKVTKDKLMDFLEKEFDEFRIVDLTGLDKENKAFNASYGTYHDLRKILDKDFLDNSKNEKILEDIVLTLTLFEDREMIRKRLKNYSDLLTKEQLKKLERRHYTGWGRLSAELIHGIRNKESRKTILDYLIDDGNSNRNFMQLINDDALSFKEEIAKAQVIGETDNLNQVVSDIAGSPAIKKGILQSLKIVDELVKIMGHQPENIVVEMARENQFTNQGRRNSQQRLKGLTDSIKEFGSQILKEHPVENSQLQNDRLFLYYLQNGRDMYTGEELDIDYLSQYDIDHIIPQAFIKDNSIDNRVLTSSKENRGKSDDVPSKDVVRKMKSYWSKLLSAKLITQRKFDNLTKAERGGLTDDDKAGFIKRQLVETRQITKHVARILDERFNTETDENNKKIRQVKIVTLKSNLVSNFRKEFELYKVREINDYHHAHDAYLNAVIGKALLGVYPQLEPEFVYGDYPHFHGHKENKATAKKFFYSNIMNFFKKDDVRTDKNGEIIWKKDEHISNIKKVLSYPQVNIVKKVEEQTGGFSKESILPKGNSYKLIPRKTKKFYWDTKKYGGFDSPIVAYSILVIADIEKGKSKKLKTVKALVGVTIMEKMTFERDPVAFLERKGYRNVQEENIIKLPKYSLFKLENGRKRLLASARELQKGNEIVLPNHLGTLLYHAKNIHKVDEPKHLDYVDKHKDEFKELLDVVSNFSKKYTLAEGNLEKIKELYAQNNGEDLKELASSFINLLTFTAIGAPAAFKFFDKNIDRKRYTSTTEILNATLIHQSITGLYETRIDLSKLGGD

SEQ ID NO: 257 - protein, 1345 aa, Streptococcus mutans
MKKPYSIGLDIGTNSVGWAVVTDDYKVPAKKMKVLGNTDKSHIKKNLLGALLFDSGNTAEDRRLKRTARRRYTRRRNRILYLQEIFSEEMGKVDDSFFHRLEDSFLVTEDKRGERHPIFGNLEEEVKYHENFPTIYHLRQYLADNPEKTDLRLVYLALAHIIKFRGHFLIEGKFDTRNNDVQRLFQEFLAVYDNTFENSSLQEQNVQVEEILTDKISKSAKKDRVLKLFPNEKSNGRFAEFLKLIVGNQADFKKHFELEEKAPLQFSKDIYEEELEVLLAQIGDNYAELFLSAKKLYDSILLSGILTVTDVSTKAPLSASMIQRYNEHQMDLAQLKQFIRQKLSDKYNEVFSDVSKDGYAGYIDGKTNQEAFYKYLKGLLNKIEGSGYFLDKIEREDFLRKQRTFDNGSIPHQIHLQEMRAIIRRQAEFYPFLADNQDRIEKILTFRIPYYVGPLARGKSDFAWLSRKSADKITPWNFDEIVDKESSAEAFINRMTNYDLYLPNQKVLPKHSLLYEKFTVYNELTKVKYKTEQGKTAFFDANMKQEIFDGVFKVYRKVTKDKLMDFLEKEFDEFRIVDLTGLDKENKAFNASYGTYHDLRKILDKDFLDNSKNEKILEDIVLTLTLFEDREMIRKRLKNYSDLLTKEQLKKLERRHYTGWGRLSAELIHGIRNKESRKTILDYLIDDGNSNRNFMQLINDDALSFKEEIAKAQVIGETDNLNQVVSDIAGSLAIKKGILQSLKIVDELVKIMGHQPENIVVEMARENQFTNQGRRNSQQRLKGLTDSIKEFGSQILKEHPVENSQLQNDRLFLYYLQNGRDMYTGEELDIDYLSQYDIDHIIPQAFIKDNSIDNRVLTSSKENRGKSDDVPSKDVVRKMKSYWSKLLSAKLITQRKFDNLTKGERGGLTDDDKAGFIKRQLVETRQITKHVARILDERFNTETDENNKKIRQVKIVTLKSNLVSNFRKEFELYKVREINDYHHAHDAYLNAVIGKALLGVYPQLEPEFVYGDYPHFHGHKENKATAKKFFYSNIMNFFKKDDVRTDKNGEIIWKKDEYISNIKKVLSYPQVNIVKKVEEQTGGFFKESILPKGDSDKLIPRKTKKFYWDTKKYGGFDSPIVAYSILVIADIEKGKSKKLKTVKALVGVTIMEKMTFERDPVAFLERKGYRNVQEENIIKLPKYSLFKLENGRKRLLASARELQKGNEIVLPNHLGTLLYHAKNIHKVDEPKHLDYVDKHKDEFKELLDVVSNFSKKYTLAEGNLEKIKELYAQNNGEDLKELASSFINLLTFTAIGAPATFKFFDKNIDRKRYTSTTEILNATLIHQSITGLYETRIDLSKLGGD

SEQ ID NO: 258 - protein, 1345 aa, Streptococcus mutans
MKKPYSIGLDIGTNSVGWAVVTDDYKVPAKKMKVLGNTDKSHIKKNLLGALLFDSGNTAEDRRLKRTARRRYTRRRNRILYLQEIFSEEMGKVDDSFFHRLEDSFLVTEDKRGERHPIFGNLEEEVKYHENFPTIYHLRQYLADNPEKTDLRLVYLALAHIIKFRGHFLIEGKFDTRNNDVQRLFQEFLAVYDNTFENSSLQEQNVQVEEILTDKISKSAKKDRVLKLFPNEKSNGRFAEFLKLIVGNQADFKKHFELEEKAPLQFSKDIYEEELEVLLAQIGDNYAELFLSAKKLYDSILLSGILTVTDVSTKAPLSASMIQRYNEHQMDLAQLKQFIRQKLSDKYNEVFSDVSKDGYAGYIDGKTNQEAFYKYLKGLLNKIEGSGYFLDKIEREDFLRKQRTFDNGSIPHQIHLQEMRAIIRRQAEFYPFLADNQDRIEKILTFRIPYYVGPLARGKSDFAWLSRKSADKITPWNFDEIVDKESSAEAFINRMTNYDLYLPNQKVLPKHSLLYEKFTVYNELTKVKYKTEQGKTAFFDANMKQEIFDGVFKVYRKVTKDKLMDFLEKEFDEFRIVDLTGLDKENKAFNASYGTYHDLRKILDKDFLDNSKNEKILEDIVLTLTLFEDREMIRKRLKNYSDLLTKEQLKKLERRHYTGWGRLSAELIHGIRNKESRKTILDYLIDDGNSNRNFMQLINDDALSFKEEIAKAQVIGETDNLNQVVSDIAGSLAIKKGILQSLKIVDELVKIMGHQPENIVVEMARENQFTNQGRRNSQQRLKGLTDSIKEFGSQILKEHPVENSQLQNDRLFLYYLQNGRDMYTGEELDIDYLSQYDIDHIIPQAFIKDNSIDNRVLTSSKENRGKSDDVPSKDVVRKMKSYWSKLLSAKLITQRKFDNLTKGERGGLTDDDKAGFIKHQLVETRQITKHVARILDERFNTETDENNKKIRQVKIVTLKSNLVSNFRKEFELYKVREINDYHHAHDAYLNAVIGKALLGVYPQLEPEFVYGDYPHFHGHKENKATAKKFFYSNIMNFFKKDDVRTDKNGEIIWKKDEYISNIKKVLSYPQVNIVKKVEEQTGGFFKESILPKGDSDKLIPRKTKKFYWDTKKYGGFDSPIVAYSILVIADIEKGKSKKLKTVKALVGVTIMEKMTFERDPVAFLERKGYRNVQEENIIKLPKYSLFKLENGRKRLLASARELQKGNEIVLPNHLGTLLYHAKNIHKVDEPKHLDYVDKHKDEFKELLDVVSNFSKKYTLAEGNLEKIKELYAQNNGEDLKELASSFINLLTFTAIGAPATFKFFDKNIDRKRYTSTTEILNATLIHQSITGLYETRIDLSKLGGD

SEQ ID NO: 259 - protein, 1345 aa, Streptococcus mutans
MKKPYSIGLDIGTNSVGWAVVTDDYKVPAKKMKVLGNTDKSHIKKNLLGALLFDSGNTAEDRRLKRTARRRYTRRRNRILYLQEIFSEEMGKVDDSFFHRLEDSFLVTEDKRGERHPIFGNLEEEVKYHENFPTIYHLRQYLADNPEKTDLRLVYLALAHIIKFRGHFLIEGKFDTRNNDVQRLFQEFLAVYDNTFENSSLQEQNVQVEEILTDKISKSAKKDRVLKLFPNEKSNGRFAEFLKLIVGNQADFKKHFELEEKAPLQFSKDIYEEELEVLLAQIGDNYAELFLSAKKLYDSILLSGILTVTDVSTKAPLSASMIQRYNEHQMDLAQLKQFIRQKLSDKYNEVFSDVSKDGYAGYIDGKTNQEAFYKYLKGLLNKIEGSGYFLDKIEREDFLRKQRTFDNGSIPHQIHLQEMRAIIRRQAEFYPFLADNQDRIEKILTFRIPYYVGPLARGKSDFAWLSRKSADKITPWNFDEIVDKESSAEAFINRMTNYDLYLPNQKVLPKHSLLYEKFTVYNELTKVKYKTEQGKTAFFDANMKQEIFDGVFKVYRKVTKDKLMDFLEKEFDEFRIVDLTGLDKENKAFNASYGTYHDLRKILDKDFLDNSKNEKILEDIVLTLTLFEDREMIRKRLENYSDLLTKEQVKKLERRHYTGWGRLSAELIHGIRNKESRKTLLDYLIDDGNSNRNFMQLINDDALSFKEEIAKAQVIGETDNLNQVVSDIAGSPAIKKGILQSLKIVDELVKIMGHQPENIVVEMARENQFTNQGQRNSQQRLKGLTDSIKEFGSQILKEHPVENSQLQNDRLFLYYLQNGRDMYTGEELDIDYLSQYDIDHIIPQAFIKDNSIDNRVLTSSKENRGKSDDVPSKDVVRKMKSYWSKLLSAKLITQRKFDNLTKAERGGLTDDDKAGFIKRQLVETRQITKHVARILDERFNTETDENNKKIRQVKIVTLKSNLVSNFRKEFELYKVREINDYHHAHDAYLNAVIGKALLGVYPQLEPEFVYGDYPHFHGHKENKATAKKFFYSNIMNFFKKDDVRTDKNGEIIWKKDEYISNIKKVLSYPQVNIVKKVEEQTGGFSKESILPKGDSDKLIPRKTKKFYWDTKKYGGFDSPIVAYSILVIADIEKGKSKKLKTVKALVGVTIMEKMTFERDPVAFLERKGYRNVQEENIIKLPKYSLFKLENGRKRLLASARELQKGNEIVLPDHLGTLLYHAKNIHKVDEPKHLDYVDKHKDEFKELLDVVSNFSKKYTLAEGNLEKIKELYAQNNGEDLKELASSFINLLTFTAIGAPATFKFFDKNIDRKRYTSTTEILNATLIHQSITGLYETRIDLSKLGGD

SEQ ID NO: 260 - protein, 1345 aa, Streptococcus mutans
MKKPYSIGLDIGTNSVGWAVVTDDYKVPAKKMKVLGNTDKSHIKKNLLGALLFDSGNTAEDRRLKRTARRRYTRRRNRILYLQEIFSEEMGKVDDSFFHRLEDSFLVTEDKRGERHPIFGNLEEEVKYHENFPTIYHLRQYLADNPEKTDLRLVYLALAHIIKFRGHFLIEGKFDTRNNDVQRLFQEFLAVYDNTFENSSLQEQNVQVEEILTDKISKSAKKDRVLKLFPNEKSNGRFAEFLKLIVGNQADFKKHFELEEKAPLQFSKDIYEEELEVLLAQIGDNYAELFLSAKKLYDSILLSGILTVTDVSTKAPLSASMIQRYNEHQMDLAQLKQFIRQKLSDKYNEVFSDVSKDGYAGYIDGKTNQEAFYKYLKGLLNKIEGSGYFLDKIEREDFLRKQRTFDNGSIPHQIHLQEMRAIIRRQAEFYPFLADNQDRIEKILTFRIPYYVGPLARGKSDFAWLSRKSADKITPWNFDEIVDKESSAEAFINRMTNYDLYLPNQKVLPKHSLLYEKFTVYNELTKVKYKTEQGKTAFFDANMKQEIFDGVFKVYRKVTKDKLMDFLEKEFDEFRIVDLTGLDKENKAFNASYGTYHDLRKILDKDFLDNSKNEKILEDIVLTLTLFEDREMIRKRLKNYSDLLTKEQLKKLERRHYTGWGRLSAELIHGIRNKESRKTILDYLIDDGNSNRNFMQLINDDALSFKEEIAKAQVIGETDNLNQVVSDIAGSLAIKKGILQNLKIVDELVKIMGHQPENIVVEMARENQFTNQGRRNSQQRLKGLTDSIKEFGSQILKEHPVENSQLQNDRLFLYYLQNGRDMYTGEELDIDYLSQYDIDHIIPQAFIKDNSIDNRVLTSSKENRGKSDDVPSKDVVRKMKSYWSKLLSAKLITQRKFDNLTKGERGGLTDDDKAGFIKRQLVETRQITKHVARILDERFNTETDENNKKIRQVKIVTLKSNLVSNFRKEFELYKVREINDYHHAHDAYLNAVIGKALLGVYPQLEPEFVYGDYPHFHGHKENKATAKKFFYSNIMNFFKKDDVRTDKNGEIIWKKDEYISNIKKVLSYPQVNIVKKVEEQTGGFFKESILPKGDSDKLIPRKTKKFYWDTKKYGGFDSPIVAYSILVIADIEKGKSKKLKTVKALVGVTIMEKMTFERDPVAFLERKGYRNVQEENIIKLPKYSLFKLENGRKRLLASARELQKGNEIVLPNHLGTLLYHAKNIHKVDEPKHLDYVDKHKDEFKELLDVVSNFSKKYTLAEGNLEKIKELYAQNNGEDLKELASSFINLLTFTAIGAPATFKFFDKNIDRKRYTSTTEILNATLIHQSITGLYETRIDLSKLGGD

SEQ ID NO: 261 - protein, 1345 aa, Streptococcus mutans
MKKPYSIGLDIGTNSVGWAVVTDDYKVPAKKMKVLGNTDKSHIKKNLLGALLFDSGNTAEDRRLKRTARRRYTRRRNRILYLQEIFSEEMGKVDDSFFHRLEDSFLVTEDKRGERHPIFGNLEEEVKYHENFPTIYHLRQYLADNPEKVDLRLVYLALAHIIKFRGHFLIEGKFDTRNNDVQKLFQEFLAVYDNTFENSSLQEQNVQVEEILTDKISKSAKKDRVLKLFPNEKSNGRFAEFLKLIVGNQADFKKHFELEEKAPLQLSKDTYEEELEVLLAQIGDNYAELFLSAKKLYDSILLSGILTVTDVSTKAPLSASMIQRYNEHQMDLAQLKQFIRQKLSDKYNEVFSDVSKDGYAGYIDGKTNQEAFYKYLKGLLNKIEGSGYFLDKIEREDFLRKQRTFDNGSIPHQIHLQEMRAIIRRQAEFYPFLADNQDRIEKILTFRIPYYVGPLARGKSDFAWLSRKSADKITPWNFDEIVDKESSVEAFINRMTNYDLYLPNQKVLPKHSLLYEKFTVYNELTKVKYKTEQGKTAFFDANMKQEIFDGVFKVYRKVTKDKLMDFLEKEFDEFRIVDLTGLDKENKAFNASYGTYHDLRKILDKDFLDNSKNEKILEDIVLTLTLFEDREMIRKRLENYSDLLTKEQVKKLERRHYTGWGRLSAELIHGIRNKESRKTLLDYLIDDGNSNRNFMQLINDDALSFKEEIAKAQVIGETDNLNQVVSDIAGSPAIKKGILQSLKIVDELVKIMGHQPENIVVEMARENQFTNQGRRNSQQRLKGLTDSIKEFGSQILKEHPVENSQLQNDRLFLYYLQNGRDMYTGEELDIDYLSQYDIDHIIPQAFIKDNSIDNRVLTSSKENRGKSDDVPSKDVVRKMKSYWSKLLSAKLITQRKFDNLTKAERGGLTDDDKAGFIKRQLVETRQITKHVARILDERFNTETDENNKKIRQVKIVTLKSNLVSNFRKEFELYKVREINDYHHAHDAYLNAVIGKALLGVYPQLEPEFVYGDYPHFHGHKENKATAKKFFYSNIMNFFKKDDVRTDKNGEIIWKKDEYISNIKKVLSYPQVNIVKKVEEQTGGFSKESILPKGNSDKLIPRKTKKFYWDTKKYGGFDSPIVAYSILVIADIEKGKSKKLKTVKALVGVTIMEKMTFERDPIAFLERKGYRNVQEENIIKLPKYSLFKLENGRKRLLASARELQKGNEIVLPNHLGTLLYHAKNIHKVDEPKHLDYVDKHKDEFKELLDVVSNFSKKYTLAEGNLEKIKELYAQNNGEDLKELASSFINLLTFTAIGAPATFKFFDKNIDRKRYTSTTEILNATLIHQSITGLYETRIDLSKLGGD

SEQ ID NO: 262 - protein, 1345 aa, Streptococcus mutans
MKKPYSIGLDIGTNSVGWAVVTDDYKVPAKKMKVLGNTDKSHIKKNLLGALLFDSGNTAEDRRLKRTARRRYTRRRNRILYLQEIFSEEMGKVDDSFFHRLEDSFLVTEDKRGERHPIFGNLEEEVKYHENFPTIYHLRQYLADNPEKVDLRLVYLALAHIIKFRGHFLIEGKFDTRNNDVQKLFQEFLAVYDNTFENSSLQEQNVQVEEILTDKISKSAKKDRVLKLFPNEKSNGRFAEFLKLIVGNQADFKKHFELEEKAPLQLSKDTYEEELEVLLAQIGDNYAELFLSAKKLYDSILLSGILTVTDVSTKAPLSASMIQRYNEHQMDLAQLKQFIRQKLSDKYNEVFSDVSKDGYAGYIDGKTNQEAFYKYLKGLLNKIEGSGYFLDKIEREDFLRKQRTFDNGSIPHQIHLQEMRAIIRRQAEFYPFLADNQDRIEKILTFRIPYYVGPLARGKSDFAWLSRKSADKITPWNFDEIVDKESSVEAFINRMTNYDLYLPNQKVLPKHSLLYEKFTVYNELTKVKYKTEQGKTAFFDANMKQEIFDGVFKVYRKVTKDKLMDFLEKEFDEFRIVDLTGLDKENKAFNASYGTYHDLRKILDKDFLDNSKNEKILEDIVLTLTLFEDREMIRKRLENYSDLLTKEQVKKLERRHYTGWGRLSAELIHGIRNKESRKTLLDYLIDDGNSNRNFMQLINDDALSFKEEIAKAQVIGETDNLNQVVSDIAGSPAIKKGILQSLKIVDELVKIMGHQPENIVVEMARENQFTNQGRRNSQQRLKGLTDSIKEFGSQILKEHPVENSQLQNDRLFLYYLQNGRDMYTGEELDIDYLSQYDIDHIIPQAFIKDNSIDNRVLTSSKENRGKSDDVPSKDVVRKMKSYWSKLLSAKLITQRKFDNLTKAERGGLTDDDKAGFIKRQLVETRQITKHVARILDERFNTETDENNKKIRQVKIVTLKSNLVSNFRKEFELYKVREINDYHHAHDAYLNAVIGKALLGVYPQLEPEFVYGDYPHFHGHKENKATAKKFFYSNIMNFFKKDDVRTDKNGEIIWKKDEYISNIKKVLSYPQVNIVKKVEEQTGGFSKESILPKGNSDKLIPRKTKKFYWDTKKYGGFDSPIVAYSILVIADIEKGKSKKLKTVKALVGVTIMEKMTFERDPIAFLERKGYRNVQEENIIKLPKYSLFKLENGRKRLLASARELQKGNEIVLPNHLGTLLYHAKNIHKVDEPKHLDYVDKHKDEFKELLDVVSNFSKKYTLAEGNLEKIKELYAQNNGEDLKELASSFINLLTFTAIGAPAAFKFFDKNIDRKRYTSTTEILNATLIHQSITGLYETRIDLSKLGGD

SEQ ID NO: 263 - protein, 1345 aa, Streptococcus mutans
MKKPYSIGLDIGTNSVGWAVVTDDYKVPAKKMKVLGNTDKSHIKKNLLGALLFDSGNTAEDRRLKRTARRRYTRRRNRILYLQEIFSEEMGKVDDSFFHRLEDSFLVTEDKRGERHPIFGNLEEEVKYHENFPTIYHLRQYLADNPEKVDLRLVYLALAHIIKFRGHFLIEGKFDTRNNDVQRLFQEFLAVYDNTFENSSLQEQNVQVEEILTDKISKSAKKDRVLKLFPNEKSNGRFAEFLKLIVGNQADFKKHFELEEKAPLQFSKDTYEEELEVLLAQIGDNYAELFLSAKKLYDSILLSGILTVTDVSTKAPLSASMIQRYNEHQMDLAQLKQFIRQKLSDKYNEVFSDVSKDGYAGYIDGKTNQEAFYKYLKGLLNKIEGSGYFLDKIEREDFLRKQRTFDNGSIPHQIHLQEMRAIIRRQAEFYPFLADNQDRIEKILTFRIPYYVGPLARGKSDFAWLSRKSADKITPWNFDEIVDKESSAEAFINRMTNYDLYLPNQKVLPKHSLLYEKFTVYNELTKVKYKTEQGKTAFFDANMKQEIFDGVFKVYRKVTKDKLMDFLEKEFDEFRIVDLTGLDKENKVFNASYGTYHDLCKILDKDFLDNSKNEKILEDIVLTLTLFEDREMIRKRLENYSDLLTKEQVKKLERRHYTGWGRLSAELIHGIRNKESRKTILDYLIDDGNSNRNFMQLINDDALSFKEEIAKAQVIGETDNLNQVVSDIAGSPAIKKGILQSLKIVDELVKIMGHQPENIVVEMARENQFTNQGRQNSQQRLKGLTDSIKEFGSQILKEHPVENSQLQNDRLFLYYLQNGRDMYTGEELDIDYLSQYDIDHIIPQAFIKDNSIDNRVLTSSKENRGKSDDVPSEDVVRKMKSYWSKLLSAKLITQRKFDNLTKAERGGLTDDDKAGFIKRQLVETRQITKHVARILDERFYTETDENNKKIRQVKIVTLKSNLVSNFRKEFELYKVREINDYHHAHDAYLNAVIGKALLGVYPQLEPEFVYGDYPHFHGHKENKATAKKFFYSNIMNFFKKDDVRTDKNGEIIWKKDEHISNIKKVLSYPQVNIVKKVEEQTGGFSKESILPKGNSDKLIPRKTKKFYWDTKKYGGFDSPIVAYSILVIADIEKGKSKKLKTVKALVGVTIMEKMTFERDPVAFLERKGYRNVQEENIIKLPKYSLFKLENGRKRLLASARELQKGNEIVLPNHLGTLLYHAKNIHKVDEPKHLDYVDKHKDEFKELLDVVSNFSKKYTLAEGNLEKIKELYAQNNGEDLKELASSFINLLTFTAIGAPATFKFFDKNIDRKRYTSTTEILNATLIHQSITGLYETRIDLSKLGGD

SEQ ID NO: 264 - protein, 1345 aa, Streptococcus mutans
MKKPYSIGLDIGTNSVGWAVVTDDYKVPAKKMKVLGNTDKSHIKKNLLGALLFDSGNTAEDRRLKRTARRRYTRRRNRILYLQEIFSEEMGKVDDSFFHRLEDSFLVTEDKRGERHPIFGNLEEEVKYHENFPTIYHLRQYLADNPEKVDLRLVYLALAHIIKFRGHFLIEGKFDTRNNDVQRLFQEFLAVYDNTFENSSLQEQNVQVEEILTDKISKSAKKDRVLKLFPNEKSNGRFAEFLKLIVGNQADFKKHFELEEKAPLQFSKDTYEEDLEELLGKIGDDYADLFTLAKNLYDAILLSGILTADDSSTKAPLSASMIQRYNEHQMDLAQLKQFIRQKLSDKYNEVFSDVSKDGYAGYIDGKTNQEAFYKYLKGLLNKIEGSGYFLDKIEREDFLRKQRTFDNGSIPHQIHLQEMRAIIRRQAEFYPFLADNQDRIEKILTFRIPYYVGPLARGKSDFAWLSRKSADKITPWNFDEIVDKESSAEAFINRMTNYDLYLPNQKVLPKHSLLYEKFTVYNELTKVKYKTEQGKTAFFDANMKQEIFDGVFKVYRKVTKDKLMDFLEKEFDEFRIVDLTGLDKENKVFNASYGTYHDLCKILDKDFLDNSKNEKILEDIVLTLTLFEDREMIRKRLENYSDLLTKEQVKKLERRHYTGWGRLSAELIHGIRNKESRKTILDYLIDDGNSNRNFMQLINDDALSFKEEIAKAQVIGETDNLNQVVSDIAGSPAIKKGILQSLKIVDELVKIMGHQPENIVVEMARENQFTNQGRRNSQQRLKGLTDSIKEFGSQILKEHPVENSQLQNDRLFLYYLQNGRDMYTGEELDIDYLSQYDIDHIIPQAFIKDNSIDNRVLTSSKENRGKSDDVPSKDVVRKMKSYWSKLLSAKLITQRKFDNLTKAERGGLTDDDKAGFIKRQLVETRQITKHVARILDERFYTETDENNKKIRQVKIVTLKSNLVSNFRKEFELYKVREINDYHHAHDAYLNAVIGKALLGVYPQLEPEFVYGDYPHFHGHKENKATAKKFFYSNIMNFFKKDDVRTDKNGEIIWKKDEHISNIKKVLSYPQVNIVKKVEEQTGGFSKESILPKGNSDKLIPRKTKKFYWDTKKYGGFDSPIVAYSILVIADIEKGKSKKLKTVKALVGVTIMEKMTFERDPVAFLERKGYRNVQEENIIKLPKYSLFKLENGRKRLLASARELQKGNEIVLPNHLGTLLYHAKNIHKVDEPKHLDYVDKHKDEFKELLDVVSNFSKKYTLAEGNLEKIKELYAQNNGEDLKELASSFINLLTFTAIGAPATFKFFDKNIDRKRYTSTTEILNATLIHQSITGLYETRIDLSKLGGD

SEQ ID NO: 265 - protein, 1345 aa, Streptococcus mutans
MKKPYSIGLDIGTNSVGWAVVTDDYKVPAKKMKVLGNTDKSHIKKNLLGALLFDSGNTAEDRRLKRTARRRYTRRRNRILYLQEIFSEEMGKVDDSFFHRLEDSFLVTEDKRGERHPIFGNLEEEVKYHENFPTIYHLRQYLADNPEKVDLRLVYLALAHIIKFRGHFLIEGKFDTRNNDVQRLFQEFLAVYDNTFENSSLQEQNVQVEEILTDKISKSAKKDRVLKLFPNEKSNGRFAEFLKLIVGNQADFKKHFELEEKAPLQFSKDTYEEDLEELLGKIGDDYADLFTLAKNLYDAILLSGILTADDSSTKAPLSASMIQRYNEHQMDLAQLKQFIRQKLSDKYNEVFSDVSKDGYAGYIDGKTNQEAFYKYLKGLLNKIEGSGYFLDKIEREDFLRKQRTFDNGSIPHQIHLQEMRAIIRRQAEFYPFLADNQDRIEKILTFRIPYYVGPLARGKSDFAWLSRKSADKITPWNFDEIVDKESSAEAFINRMTNYDLYLPNQKVLPKHSLLYEKFTVYNELTKVKYKTEQGKTAFFDANMKQEIFDGVFKVYRKVTKDKLMDFLEKEFDEFRIVDLTGLDKENKVFNASYGTYHDLCKILDKDFLDNSKNEKILEDIVLTLTLFEDREMIRKRLENYSDLLTKEQVKKLERRHYTGWGRLSAELIHGIRNKESRKTILDYLIDDGNSNRNFMQLINDDALSFKEEIAKAQVIGETDNLNQVVSDIAGSPAIKKGILQSLKIVDELVKIMGHQPENIVVEMARENQFTNQGRRNSQQRLKGLTDSIKEFGSQILKEHPVENSQLQNDRLFLYYLQNGRDMYTGEELDIDYLSQYDIDHIIPQAFIKDNSIDNRVLTSSKENRGKSDDVPSKDVVRKMKPYWSKLLSAKLITQRKFDNLTKAERGGLTDDDKAGFIKRQLVETRQITKHVARILDERFNTETDENNKKIRQVKIVTLKSNLVSNFRKEFELYKVREINDYHHAHDAYLNAVIGKALLGVYPQLEPEFVYGDYPHFHGHEENKATAKKFFYSNIMNFFKKDDVRTDKNGEIIWKKDEHISNIKKVLSYPQVNIVKKVEEQTGGFSKESILPKGNSDKLIPRKTKKFYWDTKKYGGFDSPIVAYSILVIADIEKGKSKKLKTVKALVGVTIMEKMTFERDPVAFLERKGYRNVQEENIIKLPKYSLFKLENGRKRLLASARELQKGNEIVLPNHLGTLLYHAKNIHKVDEPKHLDYVDKHKDEFKELLDVVSNFSKKYTLAEGNLEKIKELYAQNNGEDLKELASSFINLLTFTAIGAPATFKFFDKNIDRKRYTSTTEILNATLIHQSITGLYETRIDLSKLGGD

SEQ ID NO: 266 - protein, 1345 aa, Streptococcus mutans
MKKPYSIGLDIGTNSVGWAVVTDDYKVPAKKMKVLGNTDKSHIKKNLLGALLFDSGNTAEDRRLKRTARRRYTRRRNRILYLQEIFSEEMGKVDDSFFHRLEDSFLVTEDKRGERHPIFGNLEEEVKYHENFPTIYHLRQYLADNPEKVDLRLVYLALAHIIKFRGHFLIEGKFDTRNNDVQRLFQEFLAVYDNTFENSSLQEQNVQVEEILTDKISKSAKKDRVLKLFPNEKSNGRFAEFLKLIVGNQADFKKHFELEEKAPLQFSKDTYEEELEVLLAQIGDNYAELFLSAKKLYDSILLSGILTVTDVSTKAPLSASMIQRYNEHQMDLAQLKQFIRQKLSDKYNEVFSDVSKDGYAGYIDGKTNQEAFYKYLKGLLNKIEGSGYFLDKIEREDFLRKQRTFDNGSIPHQIHLQEMRAIIRRQAEFYPFLADNQDRIEKILTFRIPYYVGPLARGKSDFAWLSRKSADKITPWNFDEIVDKESSAEAFINRMTNYDLYLPNQKVLPKHSLLYEKFTVYNELTKVKYKTEQGKTAFFDANMKQEIFDGVFKVYRKVTKDKLMDFLEKEFDEFRIVDLTGLDKENKVFNASYGTYHDLCKILDKDFLDNSKNEKILEDIVLTLTLFEDREMIRKRLENYSDLLTKEQVKKLERRHYTGWGRLSAELIHGIRNKESRKTILDYLIDDGNSNRNFMQLINDDALSFKEEIAKAQVIGETDNLNQVVSDIAGSPAIKKGILQSLKIVDELVKIMGHQPENIVVEMARENQFTKQGRRNSQQRLKGLTDSIKEFGSQILKEHPVENSQLQNDRLFLYYLQNGRDMYTGEELDIDYLSQYDIDHIIPQAFIKDNSIDNRVLTSSKENRGKSDDVPSKDVVRKMKSYWSKLLSAKLITQRKFDNLTKAERGGLTDDDKAGFIKRQLVETRQITKHVARILDERFYTETDENNKKIRQVKIVTLKSNLVSNFRKEFELYKVREINDYHHAHDAYLNAVIGKALLGVYPQLEPEFVYGDYPHFHGHKENKATAKKFFYSNIMNFFKKDDVRTDKNGEIIWKKDEHISNIKKVLSYPQVNIVKKVEEQTGGFSKESILPKGNSDKLIPRKTKKFYWDTKKYGGFDSPIVAYSILVIADIEKGKSKKLKTVKALVGVTIMEKMTFERDPVAFLERKGYRNVQEENIIKLPKYSLFKLENGRKRLLASARELQKGNEIVLPNHLGTLLYHAKNIHKVDEPKHLDYVDKHKDEFKELLDVVSNFSKKYTLAEGNLEKIKELYAQNNGEDLKELASSFINLLTFTAIGAPATFKFFDKNIDRKRYTSTTEILNATLIHQSITGLYETRIDLSKLGGD

SEQ ID NO: 267 - protein, 1345 aa, Streptococcus mutans
MKKPYSIGLDIGTNSVGWAVVTDDYKVPAKKMKVLGNTDKSHIKKNLLGALLFDSGNTAEDRRLKRTARRRYTRRRNRILYLQEIFSEEMGKVDDSFFHRLEDSFLVTEDKRGERHPIFGNLEEEVKYHENFPTIYHLRQYLADNPEKVDLRLVYLALAHIIKFRGHFLIEGKFDTRNNDVQRLFQEFLAVYDNTFENSSLQEQNVQVEEILTDKISKSAKKDRVLKLFPNEKSNGRFAEFLKLIVGNQADFKKHFELEEKAPLQFSKDTYEEELEVLLAQIGDNYAELFLSAKKLYDSILLSGILTVTDVSTKAPLSASMIQRYNEHQMDLAQLKQFIRQKLSDKYNEVFSDVSKDGYAGYIDGKTNQEAFYKYLKGLLNKIEGSGYFLDKIEREDFLRKQRTFDNGSIPHQIHLQEMRAIIRRQAEFYPFLADNQDRIEKILTFRIPYYVGPLARGKSDFAWLSRKSADKITPWNFDEIVDKESSAEAFINRMTNYDLYLPNQKVLPKHSLLYEKFTVYNELTKVKYKTEQGKTAFFDANMKQEIFDGVFKVYRKVTKDKLMDFLEKEFDEFRIVDLTGLDKENKVFNASYGTYHDLCKILDKDFLDNSKNEKILEDIVLTLTLFEDREMIRKRLENYSDLLTKEQVKKLERRHYTGWGRLSAELIHGIRNKESRKTILDYLIDDGNSNRNFMQLINDDALSFKEEIAKAQVIGETDNLNQVVSDIAGSPAIKKGILQSLKIVDELVKIMGHQPENIVVEMARENQFTKQGRRNSQQRLKGLTDSIKEFGSQILKEHPVENSQLQNDRLFLYYLQNGRDMYTGEELDIDYLSQYDIDHIIPQAFIKDNSIDNRVLTSSKENRGKSDDVPSKDVVRKMKSYWSKLLSAKLITQRKFDNLTKAERGGLTDDDKAGFIKRQLVETRQITKHVARILDERFYTETDENNKKIRQVKIVTLKSNLVSNFRKEFELYKVREINDYHHAHDAYLNAVIGKALLGVYPQLEPEFVYGDYPHFHGHKENKATAKKFFYSNIMNFFKKDDVRTDRNGEIIWKKDEHISNIKKVLSYPQVNIVKKVEEQTGGFSKESILPKGNSDKLIPRKTKKFYWDTKKYGGFDSPIVAYSILVIADIEKGKSKKLKTVKALVGVTIMEKMTFERDPVAFLERKGYRNVQEENIIKLPKYSLFKLENGRKRLLASARELQKGNEIVLPNHLGTLLYHAKNIHKVDEPKHLDYVDKHKDEFKELLDVVSNFSKKYTLAEGNLEKIKELYAQNNGEDLKELASSFINLLTFTAIGAPATFKFFDKNIDRKRYTSTTEILNATLIHQSITGLYETRIDLSKLGGD

SEQ ID NO: 268 - protein, 1345 aa, Streptococcus mutans
MKKPYSIGLDIGTNSVGWAVVTDDYKVPAKKMKVLGNTDKSHIKKNLLGALLFDSGNTAEDRRLKRTARRRYTRRRNRILYLQEIFSEEMGKVNDSFFHRLEDSFLVTEDKRGERHPIFGNLEEEVKYHENFPTIYHLRQYLADNPEKVDLRLVYLALAHIIKFRGHFLIEGKFDTRNNDVQRLFQEFLAVYDNTFENSSLQEQNVQVEEILTDKISKSAKKDRVLKLFPNEKSNGRFAEFLKLIVGNQADFKKHFELEEKAPLQFSKDTYEEELEVLLAQIGDNYAELFLSAKKLYDSILLSGILTVTDVSTKAPLSASMIQRYNEHQMDLAQLKQFIRQKLSDKYNEVFSDVSKDGYAGYIDGKTNQEAFYKYLKGLLNKIEGSGYFLDKIEREDFLRKQRTFDNGSIPHQIHLQEMRAIIRRQAEFYPFLADNQDRIEKILTFRIPYYVGPLARGKSDFAWLSRKSADKITPWNFDEIVDKESSAEAFINRMTNYDLYLPNQKVLPKHSLLYEKFTVYNELTKVKYKTEQGKTAFFDANMKQEIFDGVFKVYRKVTKDKLMDFLEKEFDEFRIVDLTGLDKENKVFNASYGTYHDLCKILDKDFLDNSKNEKILEDIVLTLTLFEDREMIRKRLENYSDLLTKEQVKKLERRHYTGWGRLSAELIHGIRNKESRKTILDYLIDDGNSNRNFMQLINDDALSFKEEIAKAQVIGETDNLNQVVSDIAGSPAIKKGILQSLKIVDELVKIMGHQPENIVVEMARENQFTKQGRRNSQQRLKGLTDSIKEFGSQILKEHPVENSQLQNDRLFLYYLQNGRDMYTGEELDIDYLSQYDIDHIIPQAFIKDNSIDNRVLTSSKENRGKSDDVPSKDVVRKMKSYWSKLLSAKLITQRKFDNLTKAERGGLTDDDKAGFIKRQLVETRQITKHVARILDERFYTETDENNKKIRQVKIVTLKSNLVSNFRKEFELYKVREINDYHHAHDAYLNAVIGKALLGVYPQLEPEFVYGDYPHFHGHKENKATAKKFFYSNIMNFFKKDDVRTDKNGEIIWKKDEYISNIKKVLSYPQVNIVKKVEEQTGGFSKESILPKGNSDKLIPRKTKKFYWDTKKYGGFDSPIVAYSILVIADIEKGKSKKLKTVKALVGVTIMEKMTFERDPIAFLERKGYRNVQEENIIKLPKYSLFKLENGRKRLLASARELQKGNEIVLPNHLGTLLYHAKNIHKVDEPKHLDYVDKHKDEFKELLDVVSNFSKKYTLAEGNLEKIKELYAQNNGEDLKELASSFINLLTFTAIGAPAAFKFFDKNIDRKRYTSTTEILNATLIHQSITGLYETRIDLSKLGGD

SEQ ID NO: 269 - protein, 1345 aa, Streptococcus mutans
MKKPYSIGLDIGTNSVGWAVVTDDYKVPAKKMKVLGNTDKSHIKKNLLGALLFDSGNTAEDRRLKRTTRRRYTRRRNRILYLQEIFSEEMGKVDDSFFHRLEDSFLVTEDKRGERHPIFGNLEEEVKYHENFPTIYHLRQYLADNPEKTDLRLVYLALAHIIKFRGHFLIEGKFDTRNNDVQRLFQEFLAVYDNTFENSSLQEQNVQVEEILTDKISKSAKKDRVLKLFPNEKSNGCFAEFLKLIVGNQADFKKHFELEEKAPLQFSKDTYEEELEVLLAQIGDNYAELFLSAKKLYDSILLSGILTVTDVSTKAPLSASMIQRYNEHQMDLTQLKQFIRQKLSDKYNEVFSDVSKDGYAGYIDGKTNQEAFYKYLKGLLNKIEGSGYFLDKIEREDFLRKQRTFDNGSIPHQIHLQEMRAIIRRQAEFYPFLADNQDRIEKLLTFRIPYYVGPLASGKSDFAWLSRKSADKITPWNFDEIVDKESSAEAFINRMTNYDLYLPNQKVLPKHSLLYEKFTVYNELTKVKYKTEQGKTAFFDANMKQEIFDGVFKVYRKVTKDKLMDFLEKEFDEFRIVDLTGLDKENKVFNASYGTYHDLCKILDKDFLDNSKNEKILEDIVLTLTLFEDREMIRKRLENYSDLLTKEQVKKLERRHYTGWGRLSAELIHGIRNKESRKTILDYLIDDGNSNRNFMQLINDDALSFKEEIAKAQVIGETDNLNQVVSDIAGSPAIKKGILQSLKIVDELVKIMGHQPENIVVEMARENQFTNQGRRNSQQRLKGLTDSIKEFGSQILKEHPVENSQLQNDRLFLYYLQNGRDMYTGEELDIDYLSQYDIDHIIPQAFIKDNSIDNRVLTSSKENRGKSDDVPSKDVVRKMKSYWSKLLSAKLITQRKFDNLTKAERGGLTDDDKAGFIKRQLVETRQITKHVARILDERFNTETDENNKKIRQVKIVTLKSNLVSNFRKEFELYKVREINDYHHAHDAYLNAVIGKALLGVYPQLEPEFVYGDYPHFHGHKENKATAKKFFYSNIMNFFKKDDVRTDKNGEIIWKKDEHISNIKKVLSYPQVNIVKKVEEQTGGFSKESILPKGNSDKLIPRKTKKFYWDTKKYGGFDSPIVAYSILVIADIEKGKSKKLKTVKALVGVTIMEKMTFERDPVAFLERKGYRNVQEENIIKLPKYSLFKLENGRKRLLASARELQKGNEIVLPNHLGTLLYHAKNIHKVDEPKHLDYVDKHKDEFKELLDVVSNFSKKYTLAEGNLEKIKELYAQNNGEDLKELASSFINLLTFTAIGAPATFKFFDKNIDRKRYTSTTEILNATLIHQSITGLYETRIDLSKLGGD

SEQ ID NO: 270 - protein, 1345 aa, Streptococcus mutans
MKKPYSIGLDIGTNSVGWAVVTDDYKVPAKKMKVLGNTDKSHIKKNLLGALLFDSGNTAEDRRLKRTTRRRYTRRRNRILYLQEIFSEEMGKVDDSFFHRLEDSFLVTEDKRGERHPIFGNLEEEVKYHENFPTIYHLRQYLADNPEKTDLRLVYLALAHIIKFRGHFLIEGKFDTRNNDVQRLFQEFLAVYDNTFENSSLQEQNVQVEEILTDKISKSAKKDRVLKLFPNEKSNGRFAEFLKLIVGNQADFKKHFELEEKAPLQFSKDTYEEELEVLLAQIGDNYAELFLSAKKLYDSILLSGILTVTDVSTKAPLSASMIQRYNEHQMDLTQLKQFIRQKLSDKYNEVFSDVSKDGYAGYIDGKTNQEAFYKYLKGLLNKIEGSGYFLDKIEREDFLRKQRTFDNGSIPHQIHLQEMRAIIRRQAEFYPFLADNQDRIEKLLTFRIPYYVGPLASGKSDFAWLSRKSADKITPWNFDEIVDKESSAEAFINRMTNYDLYLPNQKVLPKHSLLYEKFTVYNELTKVKYKTEQGKTAFFDANMKQEIFDGVFKVYRKVTKDKLMDFLEKEFDEFRIVDLTGLDKENKVFNASYGTYHDLCKILDKDFLDNSKNEKILEDIVLTLTLFEDREMIRKRLENYSDLLTKEQVKKLERRHYTGWGRLSAELIHGIRNKESRKTILDYLIDDGNSNRNFMQLINDDALSFKEEIAKAQVIGETDNLNQVVSDIAGSPAIKKGILQSLKIVDELVKIMGHQPENIVVEMARENQFTNQGRRNSQQRLKGLTDSIKEFGSQILKEHPVENSQLQNDRLFLYYLQNGRDMYTGEELDIDYLSQYDIDHIIPQAFIKDNSIDNRVLTSSKENRGKSDDVPSKDVVRKMKSYWSKLLSAKLITQRKFDNLTKAERGGLTDDDKAGFIKRQLVETRQITKHVARILDERFNTETDENNKKIRQVKIVTLKSNLVSNFRKEFELYKVREINDYHHAHDAYLNAVIGKALLGVYPQLEPEFVYGDYPHFHGHKENKATAKKFFYSNIMNFFKKDDVRTDKNGEIIWKKDEHISNIKKVLSYPQVNIVKKVEEQTGGFSKESILPKGNSDKLIPRKTKKFYWDTKKYGGFDSPIVAYSILVIADIEKGKSKKLKTVKALVGVTIMEKMTFERDPVAFLERKGYRNVQEENIIKLPKYSLFKLENGRKRLLASARELQKGNEIVLPNHLGTLLYHAKNIHKVDEPKHLDYVDKHKDEFKELLDVVSNFSKKYTLAEGNLEKIKELYAQNNGEDLKELASSFINLLTFTAIGAPATFKFFDKNIDRKRYTSTTEILNATLIHQSITGLYETRIDLSKLGGD

SEQ ID NO: 271 - protein, 1370 aa, Streptococcus sanguinis
MKKPYSIGLDIGTNSVGWAVVTDDYKVPAKKMRVFGDTDRSHIKKNLLGTLLFDDGNTAESRRLKRTARRRYTRRRNRILYLQEIFTESMNEIDESFFHRLDDSFLVPEDKRGSKYPIFATLQEEKEYHKQFPTIYHLRKQLADSKEKSDVRLIYLALAHMIKYRGHFLYEETFDIKNNDIQKIFNEFINIYDNTFEGSSLSGQNAQVEAIFTDKISKSAKRERVLKLFPDEKSTGLFSEFLKLIVGNQADFKKHFDLEEKAPLQFSKDTYDEELENLLGQIGDDFADLFLIAKKLYDAILLSGILTVTDPSTKAPLSASMIERYENHQKDLAALKQFIKNNLPEKYVEVFSDQSKDGYAGYIDGKTTQEAFYKYIKNLLSKFEGADYFLDKIEREDFLRKQRTFDNGSIPHQIHLQEMNAILRRQGEHYPFLKENREKIEKILTFRIPYYVGPLARDNRDFSWLTRNSDEPIRPWNFEEVVDKARSAEDFIHRMTNYDLYLPEEKVLPKHSLLYETFAVYNELTKVKFIAEGLRDYQFLDSGQKKQIVNQLFKEKRKVTEKDIIHYLHNVDGYDGIELKGIEKQFNANLSTYHDLLKITKDKEFMDDPKNEEILENIVHTLTIFEDREMIKQRLAQYDTLFDEKVIKALTRRHYTGWGKLSAKLINGIRDKQSGKTILDYLIDDDKINRNFMQLINDDGLSFKEIIQKAQVVGKTDDVKQVVQELPGSPAIKKGILQSIKIVDELVKVMGYALESIVIEMARENQTTARGKKNSQQRYKRIEDALKNLAPGLDSNILKENPTDNIQLKNDRLFLYYLQNGKDMYTGKPLDINQLSSYDIDHIIPQAFIKDDSIDNRVLTSSKDNRGKSDNVPSLEVVQKRKAFWQQLLDSKLISERKFNNLTKAERGGLDERDKVGFIRRQLVETQQITKNVAQILDARFNTEVKEKNQKIRTVKIITLKSNLVSNFRKEFGLYKVREINNYHHAHDAYLNAVVAKAILKKYPKLEPEFVYGDYQKYDLKKYISRFKPSKEIEKATEKYFFYSNLLNFFKEEVLYADGTIRKRENIEYSKDTGEIAWDKEKDFATIKKVLSYPQVNIVKKREVQTGGFSKESILPKGNSDKLIPRKTKDILWDTTKYGGFDSPVIAYSILLIADIEKGKAKKLKTVKTLVGITIMEKAAFEENPITFLENKGYHNVRKENILCLPKYSLFELENGRRRLLASAKELQKGNEIVLPVCLTTLLYHSKNLHKLDEPEHLEYIQKHRNEFKDLLNLVSEFSQKYILAEANLEKIKDLYADNEQADIEILANSFINLLTFTALGAPAAFKFFGKDVDRKRYTTVSEILNATLIHQSITGLYETRIDLSKLGEE

SEQ ID NO: 272 - protein, 1345 aa, Streptococcus mutans
MKKPYSIGLDIGTNSVGWAVVTDDYKVPDKKMKVLGNTDKSHIKKNLLGALLFDSGNTAEDRRLKRTARRRYTRRRNRILYLQEIFSEEMGKVDDSFFHRLEDSFLVTEDKRGERHPIFGNLEEEVKYHENFPTIYHLRQYLADNPEKTDLRLVYLALAHIIKFRGHFLIEGKFDTRNNDVQRLFQEFLAVYDNTFENSSLQEQNVQVEEILTDKISKSAKKDRVLKLFPNEKSNGRFAEFLKLIVGNQADFKKHFELEEKAPLQFSKDIYEEELEVLLAQIGDNYAELFLSAKKLYDSILLSGILTVTDVSTKAPLSASMIQRYNEHQMDLAQLKQFIRQKLSDKYNEVFSDVSKDGYAGYIDGKTNQEAFYKYLKGLLNKIEGSGYFLDKIEREDFLRKQRTFDNGSIPHQIHLQEMRAIIRRQAEFYPFLADNQDRIEKILTFRIPYYVGPLARGKSDFAWLSRKSADKITPWNFDEIVDKESSVEAFINRMTNYDLYLPNQKVLPKHSLLYEKFTVYNELTKVKYKTEQGKTAFFDANMKQEIFDGVFKVYRKVTKDKLMDFLEKEFDEFRIVDLTGLDKENKAFNASYGTYHDLRKILDKDFLDNSKNEKILEDIVLTLTLFEDREMIRKRLKNYSDLLTKEQLKKLERRHYTGWGRLSAELIHGIRNKESRKTILDYLIDDGNSNRNFMQLINDDALSFKEEIAKAQVIGETDNLNQVVSDIAGSPAIKKGILQSLKIVDELVKIMGHQPENIVVEMARENQFTNQGRRNSQQRLKGLTDSIKEFGSQILKEHPVENSQLQNDRLFLYYLQNGRDMYTGEELDIDYLSQYDIDHIIPQAFIKDNSIDNRVLTSSKENRGKSDDVPSKDVVRKMKSYWSKLLSAKLITQRKFDNLTKAERGGLTDDDKAGFIKRQLVETRQITKHVARILDERFYTETDENNKKIRQVKIVTLKSNLVSNFRKEFELYKVREINDYHHAHDAYLNAVIGKALLGVYPQLEPEFVYGDYPHFHGHKENKATAKKFFYSNIMNFFKKDDVRTDKNGEIIWKKDEHISNIKKVLSYPQVNIVKKVEEQTGGFSKESILPKGNSDKLIPRKTKKFYWDTKKYGGFDSPIVAYSILVIADIEKGKSKKLKTVKALVGVTIMEKMTFERDPVAFLERKGYRNVQEENIIKLPKYSLFKLENGRKRLLASARELQKGNEIVLPNHLGTLLYHAKNIHKVDEPKHLDYVDKHKDEFKELLDVVSNFSKKYTLAEGNLEKIKELYAQNNGEDLKELASSFINLLTFTAIGAPATFKFFDKNIDRKRYTSTTEILNATLIHQSITGLYETRIDLSKLGGD

SEQ ID NO: 273 - protein, 1345 aa, Streptococcus mutans
MKKPYSIGLDIGTNSVGWAVVTDDYKVSAKKMKVLGNTDKSHIKKNLLGALLFDSGNTAEDRRLKRTARRRYTRRRNRILYLQEIFAEEMSKVDDSFFHRLEDSFLVTEDKRGERHPIFGNLEEEVKYHENFPTIYHLRQYLADNPEKVDLRLVYLALAHIIKFRGHFLIEGKFDTRNNDVQRLFQEFLAVYDNTFENSSLQEQNVQVEEILTDKISKSAKKDRVLKLFPNEKSNGRFAEFLKLIVGNQADFKKHFELEEKAPLQFSKDTYEEELEVLLAQIGDNYAELFLSAKKLYDSILLSGILTVTDVSTKAPLSASMIQRYNEHQMDLAQLKQFIRQKLSDKYNEVFSDVSKDGYAGYIDGKTNQEAFYKYLKGLLNKIEGSGYFLDKIEREDFLRKQRTFDNGSIPHQIHLQEMRAIIRRQAEFYPFLADNQDRIEKILTFRIPYYVGPLARGKSDFAWLSRKSADKITPWNFDEIVDKESSAEAFINRMTNYDLYLPNQKVLPKHSLLYEKFTVYNELTKVKYKTEQGKTAFFDANMKQEIFDGVFKVYRKVTKDKLMDFLEKEFDEFRIVDLTGLDKENKAFNASYGTYHDLRKILDKDFLDNSKNEKILEDIVLTLTLFEDREMIRKRLENYSDLLTKEQVKKLERRHYTGWGRLSAELIHGIRNKESRKTILDYLIDDGNSNRNFMQLINDDALSFKEEIAKAQVIGETDNLNQVVSDIAGSPAIKKGILQSLKIVDELVKIMGHQPENIVVEMARENQFTNQGRRNSQQRLKGLTDSIKEFGSQILKEHPVEHSQLQNDRLFLYYLQNGRDMYTGEELDIDYLSQYDIDHIIPQAFIKDNSIDNRVLTSSKENRGKSDDVPSKNVVRKMKSYWSKLLSAKLITQRKFDNLTKAERGGLTDDDKAGFIKRQLVETRQITKHVARILDERFHTETDENNKKIRQVKIVTLKSNLVSNFRKEFELYKVREINDYHHTHDAYLNAVIGKALLGVYPQLEPEFVYGDYPHFHGHKENKATAKKFFYSNIMNFFKKDDVRTDKNGEIIWKKDEHISNIKKVLSYPQVNIVKKVEEQTGGFSKESILPKGNSDKLIPRKTKKFYWDTKKYGGFDSPIVAYSILVIADIEKGKSKKLKTVKALVGVTIMEKMTFERDPVAFLERKGYRNVQEENIIKLPKYSLFKLENGRKRLLASARELQKGNEIVLPNHLGTLLYHAKNIHKVDEPKHLDYVDKHKDEFKELLDVVSNFSKKYTLAEGNLEKIKELYAQNNGEDLKELASSFINLLTFTAIGAPATFKFFDKNIDRKRYTSTTEILNATLIHQSITGLYETRIDLSKLGGD

SEQ ID NO: 274 - protein, 1345 aa, Streptococcus mutans
MKKPYSIGLDIGTNSVGWSVVTDDYKVPAKKMKVLGNTDKSHIEKNLLGALLFDSGNTAEDRRLKRTARRRYTRRRNRILYLQEIFSEEMGKVDDSFFHRLEDSFLVTEDKRGERHPIFGNLEEEVKYHENFPTIYHLRQYLADNPEKVDLRLVYLALAHIIKFRGHFLIEGKFDTRNNDVQRLFQEFLAVYDNTFENSSLQEQNVQVEEILTDKISKSAKKDRVLKLFPNEKSNGRFAEFLKLIVGNQADFKKHFELEEKAPLQFSKDTYEEELEVLLAQIGDNYAELFLSAKKLYDSILLSGILTVTDVGTKAPLSASMIQRYNEHQMDLAQLKQFIRQKLSDKYNEVFSDVSKDGYAGYIDGKTNQEAFYKYLKGLLNKIEGSGYFLDKIEREDFLRKQRTFDNGSIPHQIHLQEMRAIIRRQAEFYPFLADNQDRIEKLLTFRIPYYVGPLARGKSDFAWLSRKSADKITPWNFDEIVDKESSAEAFINRMTNYDLYLPNQKVLPKHSLLYEKFTVYNELTKVKYKTEQGKTAFFDANMKQEIFDGVFKVYRKVTKDKLMDFLEKEFDEFRIVDLTGLDKENKVFNASYGTYHDLCKILDKDFLDNSKNEKILEDIVLTLTLFEDREMIRKRLENYSDLLTKEQVKKLERRHYTGWGRLSAELIHGIRNKESRKTILDYLIDDGNSNRNFMQLINDDALSFKEEIAKAQVIGETDNLNQVVSDIAGSPAIKKGILQSLKIVDELVKIMGHQPENIVVEMARENQFTNQGRRNSQQRLKGLTDSIKEFGSQILKEHPVENSQLQNDRLFLYYLQNGRDMYTGEELDIDYLSQYDIDHIIPQAFIKDNSIDNRVLTSSKENRGKSDDVPSKDVVRKMKSYWSKLLSAKLITQRKFDNLTKAERGGLTDDDKAGFIKRQLVETRQITKHVARILDERFNTETDENNKKIRQVKIVTLKSNLVSNFRKEFELYKVREINDYHHAHDAYLNAVIGKALLGVYPQLEPEFVYGDYPHFHGHKENKATAKKFFYSNIMNFFKKDDVRIDKNGEIIWKKDEHISNIKKVLSYPQVNIVKKVEEQTGGFSKESILPKGNSDKLIPRKTKKFYWDTKKYGGFDSPIVAYSILVIADIEKGKSKKLKTVKALVGVTIMEKMTFERDPVAFLERKGYRNVQEENIIKLPKYSLFKLENGRKRLLASARELQKGNEIVLPNHLGTLLYHAKNIHKVDEPKHLDYVDKHKDEFKELLDVVSNFSKKYTLAEGNLEKIKELYAQNNGEDLKELASSFINLLTFTAIGAPATFKFFDKNIDRKRYTSTTEILNATLIHQSITGLYETRIDLSKLGGD

SEQ ID NO: 275 - protein, 1348 aa, Streptococcus equi
MKKPYTIALDIGTNSVGWVVVTDDYRVPTKKMKVLGNTERKTIKKNLIGALLFDSGDTAEGTRLKRTARPRYTRRKNRLRFLKEIFTEEMAKVDDGFFQRLEDSFYVLEDKEGNKHPIFANLADEVAYHKKYPTIYHLRKELVDNPQKADLRLIYLAVAHIIKFRGHFLIEGTLSSKNNNLQKSFDHLVDTYNLLFEEQRLLTEGINAKELLSAALSKSKRLENLISLIPGQKKTGIFGNIIALSLGLTPNFKANFGLSKDVKLQLAKDTYADDLDSLLAQIGDQYADLFLAAKNLSDAILLSDILTESDEITRAPLSASMVKRYREHHKDLVTLKTLIKDQLPEKYQEIFLDKTKNGYAGYIEGQVSQEEFYKYLKPILARLDGSEPLLLKIDREDFLRKQRTFDNGSIPHQIHLEELHAILRRQEVFYPFLKDNRKKIESLLTFRIPYYVGPLARGHSRFAWVKRKFDGAIRPWNFEEIVDEEASAQIFIEKMTKNDLYLPNEKVLPKHSLLYETFTVYNELTKVKYATEGMTRPQFLSADQKQAIVDLLFKTNRKVTVKQLKENYFKKIECWDSVEITGVEDSFNASLGTYHDLLKIIQDKDFLDNPDNQKIIEDIILTLTLFEDKKMISKRLDQYAHLFDKVVLNKLERHHYTGWGRLSGKLINGIRDKQSGKTILDFLKADGFANRNFMQLIHDSELSFIDEIAKAQVIGKTEYSKDLVGNLAGSPAIKKGISQTIKIVDELVKIMGYLPQQIVIEMARENQTTAQGIKNARQRMRKLEETAKKLGSNILKEHPVDNSQLQNDKRYLYYLQNGKDMYTGDDLDIDYLSSYDIDHIIPQSFIKNNSIDNKVLTSQGANRGKLDNVPSEAIVRKMKGYWQSLLRAGAISKQKFDNLTKAERGGLTQVDKAGFIQLQLVETRQITKHVAQILDSRFNTEFDDHNKRIRKVHIITLKSKLVSDFRKEFGLYKIRDINHYHHAHDAYLNAVVAKAILGKYPQLAPEFVYGDYPKYNSFKERQKATQKTLFYSNILKFFKDQESLHVNSDGEEIWNANKHLPIIKNVLSIPQVNIVKKTEVQTGGFYKESILSKGNSDKLIPRKNNWDTRKYGGFDSPTVAYSVLVIAKMEKGKAKVLKPVKEMVGITIMERIAFEENPVVFLEAKGYREIQEHLIIKLPKYSLFELENGRRRLLASASELQKGNELFLPVDYMTFLYLAAHYHELTGSSEDVLRKKYFVERHLHYFDDIIQMINDFAERHILASSNLEKINHTYHNNSDLPVNERAENIINVFTFVALGAPAAFKFFDATIDRKRYTSTKEVLNATLIHQSVTGLYETRIDLSQLGEN

SEQ ID NO: 276 - protein, 1348 aa, Streptococcus equi
MKKPYTIALDIGTNSVGWVVVTDDYRVPTKKMKVLGNTERKTIKKNLIGALLFDSGDTAEGTRLKRTARRRYTRRKNRLRYLKEIFTEEMAKVDDGFFQRLEDSFYVLEDKEGNKHPIFANLADEVAYHKKYPTIYHLRKELVDNPQKADLRLIYLAVAHIIKFRGHFLIEGTLSSKNNNLQKSFDHLVDTYNLLFEEQRLLTEGINAKELLSAALSKSKRLENLISLIPGQKKTGIFGNIIALSLGLTPNFKANFGLSKDVKLQLAKDTYADDLDSLLAQIGDQYADLFLAAKNLSDAILLSDILTESDEITRAPLSASMVKRYREHHKDLVTLKTLIKDQLPEKYQEIFLDKTKNGYAGYIEGQVSQEEFYKYLKPILARLDGSEPLLLKIDREDFLRKQRTFDNGSIPHQIHLEELHAILRRQEVFYPFLKDNRKKIESLLTFRIPYYVGPLARGHSRFAWVKRKFDGAIRPWNFEEIVDEEASAQIFIEKMTKNDLYLPNEKVLPKHSLLYETFTVYNELTKVKYATEGMTRPQFLSADQKQAIVDLLFKTNRKVTVKQLKENYFKKIECWDSVEITGVEDSFNASLGTYHDLLKIIQDKDFLDNPDNQKIIEDIILTLTLFEDKKMISKRLDQYAHLFDKVVLNKLERHHYTGWGRLSGKLINGIRDKQSGKTILDFLKADGFANRNFMQLIHDSELSFIDEIAKAQVIGKTEYSKDLVGNLAGSPAIKKGISQTIKIVDELVKIMGYLPQQIVIEMARENQTTAQGIKNARQRMRKLEETAKKLGSNILKEHPVDNSQLQNDKRYLYYLQNGKDMYTGDDLDIDYLSSYDIDHIIPQSFIKNNSIDNKVLTSQGANRGKLDNVPSEAIVRKMKGYWQSLLRAGAISKQKFDNLTKAERGGLTQVDKAGFIQRQLVETRQITKHVAQILDSRFNTEFDDHNKRIRKVHIITLKSKLVSDFRKEFGLYKIRDINHYHHAHDAYLNAVVAKAILGKYPQLAPEFVYGDYPKYNSFKERQKATQKMLFYSNILKFFKDQESLHVNSDGEEIWNANKHLPIIKNVLSIPQVNIVKKTEVQTGGFYKESILSKGNSDKLIPRKNNWDTRKYGGFDSPTVAYSVLVIAKMEKGKAKVLKPVKEMVGITIMERTAFEENPVVFLEARGYREIQEHLIIKLPKYSLFELENGRRRLLASASELQKGNELFLPVDYMTFLYLAAHYHELTGSSEDVLRKKYFVDRHLHYFDDIIQMINDFAERHILASSNLEKINHTYHNNSDLPVNERAENIINVFTFVALGAPAAFKFFDATIDRKRYTSTKEVLNATLIHQSVTGLYETRIDLSQLGEN

SEQ ID NO: 277 - protein, 1348 aa, Streptococcus equi
MKKPYTIALDIGTNSVGWVVVTDDYRVPTKKMKVLGNTERKTIKKNLIGALLFDSGDTAEGTRLKRTARRRYTRRKNRLRYLKEIFTEEMAKVDDGFFQRLEDSFYVLEDKEGNKHPIFANLADEVAYHKKYPTIYHLRKELVDNPQKADLRLIYLAVAHIIKFRGHFLIEGTLSSKNNNLQKSFDHLVDTYNLLFEEQRLLTEGINAKELLSAALSKSKRLENLISLIPGQKKTGIFGNIIALSLGLTPNFKANFGLSKDVKLQLAKDTYADDLDSLLAQIGDQYADLFLAAKNLSDAILLSDILTESDEITRAPLSASMVKRYREHHKDLVTLKTLIKDQLPEKYQEIFLDKTKNGYAGYIEGQVSQEEFYKYLKPILARLDGSEPLLLKIDREDFLRKQRTFDNGSIPHQIHLEELHAILRRQEVFYPFLKDNRKKIESLLTFRIPYYVGPLARGHSRFAWVKRKFDGAIRPWNFEEIVDEEASAQIFIEKMTKNDLYLPNEKVLPKHSLLYETFTVYNELTKVKYATEGMTRPQFLSADQKQAIVDLLFKTNRKVTVKQLKENYFKKIECWDSVEITGVEDSFNASLGTYHDLLKIIQDKDFLDNPDNQKIIEDIILTLTLFEDKKMISKRLDQYAHLFDKVVLNKLERHHYTGWGRLSGKLINGIRDKQSGKTILDFLKADGFANRNFMQLIHDSELSFIDEIAKAQVIGKTEYSKDLVGNLASSPAIKKGISQTIKIVDELVKIMGYLPQQIVIEMARENQTTAQGIKNARQRMRKLEETAKKLGSNILKEHPVDNSQLQNDKRYLYYLQNGKDMYTGDDLDIDYLSSYDIDHIIPQSFIKNNSIDNKVLTSQGANRGKLDNVPSEAIVRKMKGYWQSLLRAGAISKQKFDNLTKAERGGLTQVDKAGFIQRQLVETRQITKHVAQILDSRFNTEFDDHNKRIRKVHIITLKSKLVSDFRKEFGLYKIRDINHYHHAHDAYLNAVVAKAILGKYPQLAPEFVYGDYPKYNSFKERQKATQKTLFYSNILKFFKDQESLHVNSDGEEIWNANKHLPIIKNVLSIPQVNIVKKTEVQTGGFYKESILSKGNSDKLIPRKNNWDTRKYGGFDSPTVAYSVLVIAKMEKGKAKVLKPVKEMVGITIMERIAFEENPVVFLEAKGYREIQEHLIIKLPKYSLFELENGRRRLLASASELQKGNELFLPVDYMTFLYLAAHYHELTGSSEDVLRKKYFVERHLHYFDDIIQMINDFAERHILASSNLEKINHTYHNNSDLPINERAENIINVFTFVALGAPAAFKFFDATIDRKRYTSTKEVLNATLIHQSVTGLYETRIDLSQLGEN

SEQ ID NO: 278 - protein, 1334 aa, Listeria seeligeri
MKKPYTIGLDIGTNSVGWAALTDQYDLVKRKMKVAGNSEKKQIKKNLWGVRLVDEGKTAAHRRVNRTTRRRIERRRNRISYLQEIFTAEMFEVDANFFYRLEDSFYIESEKRQSRHPFFATIEEEVAYHENYRTIYHLREKLVNSSDKADLRLVYLALAHIIKYRGNFLIEGKLDTKNTSVDEVFKQFIKTYNQVFASDIEEGSLTRIEENNEVAKIFSEKLTKREKLDKILNLYPNEKSTDLFAQFISLIIGSKGNFKKFFNLTEKTDIECAKDSYEEDLEVLLARVGDEYAEIFVAAKNAYNAVVLSSIITVSNTETKAKLSASMIERFDKHDKDLKRMKAFFKVRLPENFNEVFNDVEKDGYAGYIEGKTKQEAFYKYMKKMLEHVEGADYFINQIEEENFLRKQRTFDNGAIPHQLHLEELEAILHQQAKYYPFLKVDYEKIKSLVTFRIPYFVGPLANGQSEFSWLTRKADGEIRPWNIEEKVDFGKSAIDFIEKMTNKDTYLPKENVLPKHSMCYQKYMVYNELTKIRYTDDQGKTHYFSGQEKQQIFNDLFKQKRKVKKKDLELFLYNMNHVESPTVEGVEDAFNSSFTTYHDLQKVGVPQEILDDPLNTEMLEEIIKILTVFEDKRMINERLQEFSNVLDEAVLKKLERRHYTGWGRLSAKLLIGIRDKESHLTILDYLMNDDKHNRNLMQLINDSNLSFKSIIEKEQVSTADKDIQSIVADLAGSPAIKKGILQSLKIVDELVGIMGYPPQTIVVEMARENQTTGKGKNNSKPRFTSLEKAIKELGSQILKEHPTDNQGLKNDRLYLYYLQNGKDMYTGQELDIHNLSNYDIDHVVPQSFITDNSIDNRVLASSAANREKGDNVPSLEVVRKRKVYWEKLYQAKLMSKRKFDYLTKAERGGLTEADKARFIHRQLVETRQITKNVANILHQRFNCKKDESGNVIEQVRIVTLKAALVSQFRKQFQLYKVREVNDYHHAHDAYLNCVVANTLLKVYPQLEPEFVYGDYHQFDWFKANKATAKKQFYTNIMLFFAKKDRIIDENGEILWDKKYLDTIKKVLNYRQMNIVKKTEIQKGEFSNATANPKGNSSKLIPRKADWDPIKYGGFDGSNMAYAIVIEHEKRKKKTVIKKELIQINIMERTAFEKDQKEFLEGKGYRNPKVITKIPKYTLYECENGRRRMLGSANEAQKGNQMVLPNHLMTLLYHAKNCEASDGKSLAYIESHREMFAELLDSISEFASRYTLADANLEKINTIFEQNKSGDVKVIAQSFVNLLEFNAMGAPASFKYFETNIERKRYNNLKELLNATIIYQSITGLYEARKRLDD

SEQ ID NO: 279 - protein, 1334 aa, Listeria innocua
MKKPYTIGLDIGTNSVGWAVLTDQYDLVKRKMKIAGDSEKKQIKKNFWGVRLFDEGQTAADRRMARTARRRIERRRNRISYLQGIFAEEMSKTDANFFCRLSDSFYVDNEKRNSRHPFFATIEEEVEYHKNYPTIYHLREELVNSSEKADLRLVYLALAHIIKYRGNFLIEGALDTQNTSVDGIYKQFIQTYNQVFASGIEDGSLKKLEDNKDVAKILVEKVTRKEKLERILKLYPGEKSAGMFAQFISLIVGSKGNFQKPFDLIEKSDIECAKDSYEEDLESLLALIGDEYAELFVAAKNAYSAVVLSSIITVAETETNAKLSASMIERFDTHEEDLGELKAFIKLHLPKHYEEIFSNTEKHGYAGYIDGKTKQADFYKYMKMTLENIEGADYFIAKIEKENFLRKQRTFDNGAIPHQLHLEELEAILHQQAKYYPFLKENYDKIKSLVTFRIPYFVGPLANGQSEFAWLTRKADGEIRPWNIEEKVDFGKSAVDFIEKMTNKDTYLPKENVLPKHSLCYQKYLVYNELTKVRYINDQGKTSYFSGQEKEQIFNDLFKQKRKVKKKDLELFLRNMSHVESPTIEGLEDSFNSSYSTYHDLLKVGIKQEILDNPVNTEMLENIVKILTVFEDKRMIKEQLQQFSDVLDGVVLKKLERRHYTGWGRLSAKLLMGIRDKQSHLTILDYLMNDDGLNRNLMQLINDSNLSFKSIIEKEQVTTADKDIQSIVADLAGSPAIKKGILQSLKIVDELVSVMGYPPQTIVVEMARENQTTGKGKNNSRPRYKSLEKAIKEFGSQILKEHPTDNQELRNNRLYLYYLQNGKDMYTGQDLDIHNLSNYDIDHIVPQSFITDNSIDNLVLTSSAGNREKGDDVPPLEIVRKRKVFWEKLYQGNLMSKRKFDYLTKAERGGLTEADKARFIHRQLVETRQITKNVANILHQRFNYEKDDHGNTMKQVRIVTLKSALVSQFRKQFQLYKVRDVNDYHHAHDAYLNGVVANTLLKVYPQLEPEFVYGDYHQFDWFKANKATAKKQFYTNIMLFFAQKDRIIDENGEILWDKKYLDTVKKVMSYRQMNIVKKTEIQKGEFSKATIKPKGNSSKLIPRKTNWDPMKYGGLDSPNMAYAVVIEYAKGKNKLVFEKKIIRVTIMERKAFEKDEKAFLEEQGYRQPKVLAKLPKYTLYECEEGRRRMLASANEAQKGNQQVLPNHLVTLLHHAANCEVSDGKSLDYIESNREMFAELLAHVSEFAKRYTLAEANLNKINQLFEQNKEGDIKAIAQSFVDLMAFNAMGAPASFKFFETTIERKRYNNLKELLNSTIIYQSITGLYESRKRLDD

SEQ ID NO: 280 - protein, 1334 aa, Listeria innocua
MKKPYTIGLDIGTNSVGWAVLTDQYDLVKRKMKIAGDSEKKQIKKNFWGVRLFDEGQTAADRRMARTARRRIERRRNRISYLQGIFAEEMSKTDANFFCRLSDSFYVDNEKRNSRHPFFATIEEEVEYHKNYPTIYHLREELVNSSEKADLRLVYLALAHIIKYRGNFLIEGALDTQNTSVDGIYKQFIQTYNQVFASGIEDGSLKKLEDNKDVAKILVEKVTRKEKLERILKLYPGEKSAGMFAQFISLIVGSKGNFQKPFDLIEKSDIECAKDSYEEDLESLLALIGDEYAELFVAAKNAYSAVVLSSIITVAETETNAKLSASMIERFDTHEEDLGELKAFIKLHLPKHYEEIFSNTEKHGYAGYIDGKTKQADFYKYMKMTLENIEGADYFIAKIEKENFLRKQRTFDNGAIPHQLHLEELEAILHQQAKYYPFLKENYDKIKSLVTFRIPYFVGPLANGQSEFAWLTRKADGEIRPWNIEEKVDFGKSAVDFIEKMTNKDTYLPKENVLPKHSLCYQKYLVYNELTKVRYINDQGKTSYFSGQEKEQIFNDLFKQKRKVKKKDLELFLRNMSHVESPTIEGLEDSFNSSYSTYHDLLKVGIKQEILDNPVNTEMLENIVKILTVFEDKRMIKEQLQQFSDVLDGVVLKKLERRHYTGWGRLSAKLLMGIRDKQSHLTILDYLMNDDGLNRNLMQLINDSNLSFKSIIEKEQVTTADKDIQSIVADLAGSPAIKKGILQSLKIVDELVSVMGYPPQTIVVEMARENQTTGKGKNNSRPRYKSLEKAIKEFGSQILKEHPTDNQELRNNRLYLYYLQNGKDMYTGQDLDIHNLSNYDIDHIVPQSFITDNSIDNLVLTSSAGNREKGDDVPPLEIVRKRKVFWEKLYQGNLMSKRKFDYLTKAERGGLTEADKARFIHRQLVETRQITKNVANILHQRFNYEKDDHGNTMKQVRIVTLKSALVSQFRKQFQLYKVRDVNDYHHAHDAYLNGVVANTLLKVYPQLEPEFVYGDYHQFDWFKANKATAKKQFYTNIMLFFAQKDRIIDENGEILWDKKYLDTVKKVMSYRQMNIVKKTEIQKGEFSKATIKPKGNSSKLISRKTNWDPMKYGGLDSPNMAYAVVIEYAKGKNKLVFEKKIIRVTIMERKAFEKDEKAFLEEQGYRQPKVLAKLPKYTLYECEEGRRRMLASANEAQKGNQQVLPNHLVTLLHHVANCEVSDGKSLDYIESNREMFAELLAHVSEFAKRYTLAEANLNKINQLFEQNKEGDIKAIAQSFVDLMAFNAMGAPASFKFFETTIERKRYNNLKELLNSTIIYQSITGLYESRKRLDD

SEQ ID NO: 281 - protein, 1334 aa, Listeria monocytogenes
MKKPYTIGLDIGTNSVGWAVLTDQYDLVKRKMKISGDSEKKQIKKNFWGVRLFEKGETAAKRRMSRTARRRIERRRNRISYLQEIFAIQMNEVDDNFFNRLKESFYAESDKKYNRHPFFGTVEEEVAYYKDFPTIYHLRKELIDSQKKADLRLVYLALAHIIKYRGHFLIEGALDTKNTSIDEMFKQFLQIYNQVFANDIEEASLKKTEKNQEVAQILAEKFTRKDKLDKILSLYPGEKTTGVFAQFVNIIVGSTGKFKKHFNLHEKKDINCAEDTYDTDLESLLAIIGDEFAEVFVAAKNAYNAVVLSNIITVTDSTTRAKLSASLIERFENHKEDLKKMKRFVRTYLPEKYDEIFDDTEKHGYAGYISGKTKQADFYKYMKATLEKIEGADYFIAKIEEENFLRKQRTFDNGVIPHQLHLEELEAILHQQAKYYPFLREDYEKIKSLVTFRIPYFVGPLAKGQSEFAWLTRKADGEIRPWNIEEKVDFGKSAVDFIEKMTNKDTYLPKENVLPKHSLCYQKYMVYNELTKVRYIDDQGKTNYFSGQEKQQIFNDLFKQKRKVKKKDLELFLRNINQIESPTIEGLEDSFNASYATYHDLLKVGMKQEILDNPLNTEMLEDIVKILTVFEDKRMIKEQLQQFSDVLDGTVLKKLERRHYTGWGRLSAKLLVGIRDKQSHLTILDYLMNDDGLNRNLMQLINDSNLSFKSIIEKEQVSTTDKDLQSIVAELAGSPAIKKGILQSLKIVDELVSVMGYPPQTIVVEMARENQTTNKGKNNSKPRYKSLEKAIKEFGSQILKEHPTDNQELKNNRLYLYYLQNGKDMYTGQELDIHNLSNYDIDHIVPQSFITDNSVDNLVLTSSAGNREKGDNVPPLEIVQKRKIFWEKLYQGNLMSKRKFDYLTKAERGGLTEADKARFIHRQLVETRQITKNVANILHQRFNYKTDGNKDTMETVRIVTLKSALVSQFRKQFQFYKVREVNDYHHAHDAYLNGVVANTLLKVYPQLEPEFVYGEYHQFGWFKANKATAKKQFYTNIMLFFAQKDRIIDENGEILWDKRYLETVKKVLGYRQMNIVKKTEIQKGEFSNVTPNPKGKSNKLIPRKKDWDPIKYGGFDGSKMAYAIIIEYEKQKRKVRIEKKLIQINIMEREAFEKDEKTFLEEKGYHQPKVLIKVPKYTLYECKNGRRRMLGSANEAHKGNQMLLPNHLMALLYHAEKYEAIDGESLAYIEVHRALFDELLAYISEFARKYTLSNDRLDEINMLYERNKDGDVKSIAESFVSLKKFNAFGVHQDFSFFGTKIERKRDRKLNELLNSTIIYQSITGLYESRKRLDN

SEQ ID NO: 282 - protein, 1334 aa, Listeria monocytogenes
MKKPYTIGLDIGTNSVGWAVLTDQYDLVKRKMKISGDSEKKQIKKNFWGVRLFEKGETAAKRRMSRTARRRIERRRNRISYLQEIFAIQMNEVDDNFFNRLKESFYAESDKKYNRHPFFGTVEEEVAYYKDFPTIYHLRKELIDSQKKADLRLVYLALAHIIKYRGHFLIEGALDTKNTSIDEMFKQFLQIYNQVFANDIEEASLKKTEKNQEVAQILAEKFTRKDKLDKILSLYPGEKTTGVFAQFVNIIVGSTGKFKKHFNLHEKKDINCAEDTYDTDLESLLAIIGDEFAEVFVAAKNAYNAVVLSNIITVTDSTTRAKLSASLIERFENHKEDLKKMKRFVRTYLPEKYDEIFDDTEKHGYAGYISGKTKQADFYKYMKATLEKIEGADYFIAKIEEENFLRKQRTFDNGVIPHQLHLEELEAILHQQAKYYPFLREDYEKIKSLVTFRIPYFVGPLAKGQSEFAWLTRKADGEIRPWNIEEKVDFGKSAVDFIEKMTNKDTYLPKENVLPKHSLCYQKYMVYNELTKVRYIDDQGKTNYFSGQEKQQIFNDLFKQKRKVKKKDLELFLRNINQIESPTIEGLEDSFNASYATYHDLLKVGMKQEILDNPLNTEMLEDIVKILTVFEDKRMIKEQLQQFSDVLDGTVLKKLERRHYTGWGRLSAKLLVGIRDKQSHLTILDYLMNDDGLNRNLMQLINDSNLSFKSIIEKEQVSTADKDLQSIVADLAGSPAIKKGILQSLKIVDELVSVMGYPPQTIVVEMARENQTTNKGKNNSKPRYKSLEKAIKEFGSQILKEHPTDNQELKNNRLYLYYLQNGKDMYTGQELDIHNLSNYDIDHIVPQSFITDNSVDNLVLTSSAGNREKGDNVPPLEIVQKRKIFWEKLYQGNLMSKRKFDYLTKAERGGLTEADKARFIHRQLVETRQITKNVANILHQRFNYKTDGNKDTMETVRIVTLKSALVSQFRKQFQFYKVREVNDYHHAHDAYLNGVVANTLLKVYPQLEPEFVYGEYHQFDWFKANKATAKKQFYTNIMLFFAQKDRIIDENGEILWDKRYLETVKKVLGYRQMNIVKKTEIQKGEFSNVTPNPKGKSNKLIPRKKDWDPIKYGGFDGSKMAYAIIIEYEKQKRKVRIEKKLIQINIMEREAFEKDEKTFLEEKGYHQPKVLIKVPKYTLYECENGRRRMLGSANEAHKGNQMLLPNHLMALLYHAEKYEAIDGESLAYIEVHRALFDELLAYISEFARKYTLSNDRLDEINMLYERNKDGDVKSIAESFVSLKKFNAFGVHQDFSFFGTKIERKRDRKLNELLNSTIIYQSITGLYESRKRLDN

SEQ ID NO: 283 - protein, 1374 aa, Streptococcus pseudoporcinus
MKKRYSYSIGLDIGTNSVGWAVINEDYKVPAKKMTVFGNTDRKTIKKNLLGTVLFDSGETAQARRLKRTNRRRYTRRRYRLCQLQNIFATEMVKVDDTFFQRLSESFFYYQDKAFDKHPIFGNSKEERAYHKTYPTIYHLRKDLADRDQKADLRLIYLALSHIIKFRGHFLIEGKLNSENTDVQKLFIALVTVYNLLFEEEPIAGETCDAKALLTAKTSKSKRLESLISEFPGQKKNGLFGNLLALALGLRPNFKSNFGLSEDAKLQITKDTYEEELDNLLAEIGDHYADLFLAAKNLSDAILLSDILTLSDENTRAPLSASMIKRYEEHQEDLALLKKLVKEQMPEKYWEIFSNAKKNGYAGYIEGKVSQEDFYRYIKPILSRLKGGDEFLAKIDRDDFLRKQRTFDNGSIPHQIHLKELHAILRRQEKYYPFLAEQKEKIEQLLCFRIPYYVGPLAKGGNSSFAWLKRRSDEPITPWNFKDVVDEEASAQAFIEGMTNYDTYLPEEKVLPKHSPLYEMFTVYNELTKVKYIAENMTKPLYLSAEQKEAIIDHLFKQTRKVTVKDLKEKYFSQIEGLENVDVTGVEGAFNASLGTYNDLLKIIKDKAFLDDEANAEILEEIVLILTLFQDEKLIEKRLAKYANLFEKSVLKKLRKRHYRGWGRLSRQLIDGMKDKASGKTILDFLKADDFANRNFIQLINDSSLDFEKLIDDAQKKAIKRESLTEAVANLAGSPAIKKGILQSLKVVDEIVKVMGHNPDNIVIEMSRENQTTAQGLKNARQRLKKIKEVHKKTGSRILEDNSERITNLTLQDNRLYLYLLQDGKDMYTGQDLDINNLSQYDIDHIIPQSFIKDNSIDNLVLTTQKANRGKSDNVPSIEVVRDMKDRVWRRQLANGAISRQKFDHLTKAERGGLADSDKARFLRRQLVETRQITKHVAQLLDSRFNSKSNQNKKLARNVKIITLKSKIVSDFRKDFGLYKLREVNNYHHAHDAYLNAVVGTALLKKYPKLEAEFVYGDYKHFDLVKLISKSDPSLGKATAKVFFYSNIMNFFKEELSLADGTLMKRPVIETNTETGEVVWDKVKDFKTIRKVLSYPQVNIVKKTEIQSGAFSKESVLSKGNSDKLIERKKGWDPKKYGGFDSPNTAYSIFVVAKVAKRKAQKLKTVKEIVGITIMEQAEYEKDNIAFLEKKGYQDIQEKLLIKLPKYSLFELENGRRRLLASANEFQKGNELALSGKYMKFLYLASRYDKLSSKIESEQQKKLFVEQHLHYFDEILDIVVKHATCYIKAENNLKKIISLYKKKEAYSINEQALNMLNLFIFTSLGAPSTFVFFDETIDRKRYTTSSDVLNGILIQQSITGLYETRIDLSRFGGD

SEQ ID NO: 284 - protein, 1355 aa, Streptococcus mutans
MKKSYSIGLDIGTNSVGWAVVTDDYKVPAKKMKVLGNTDKSHIKKNLLGALLFDSGNTAEDRRLKRTARRRYTRRRNRILYLQEIFSEEMGKVDDSFFHRLDESFLTDDDKNFDSHPIFGNKAEEDAYHQKFPTIYHLRKHLADSTEKADLRLVYLALAHMIKFRGHFLIEGELNAENTDVQKLFADFVGVYDRTFDDSHLSEITVDASSILTEKISKSRRLEKLINNYPKEKKNTLFGNLIALSLGLQPNFKTNFKLSEDAKLQFSKDTYEEDLEELLGKIGDDYADLFTLAKNLYDAILLSGILTADDSSTKAPLSASMIKRYAEHHEDLEKLKEFIKANKPELYHDIFKDETKNGYAGYIENGVKQDEFYKYLKNTLSKIAGSDYFLDKIEREDFLRKQRTFDNGSIPHQIHLQEMHAILRRQGDYYPFLKENQDRIEKILTFRIPYYVGPLARKNSRFAWAEYHSDEAVMPWNFDQVIDKESSAQAFIEHMTNNDLYLPNEKVLPKHSPLYEKYTVYNELTKIKYVTEIGEAKFFDANLKQEIFDGLFKHERKVTKKKLRTFLDKNFDEFRIVDIQGLDKETETFNASYATYQDLLKVIKDKVFMDNPENAEILENIVLTLTLFEDREMIKQRLAKYADVFDKKVIDQLARRHYTGWGRLSAKLLNGIRDKQSCKTIMDYLIDDAQSNRNLMQLITDDNLTFKDDIVKAQYVDNSDDLHQVVQSLAGSPAIKKGILQSLKIVDELVKVMGKEPEQIVVEMARENQTTAKGRRNSQQRYKRLKEAIKSLDRDLNHKILKEHPTDNQALQNNRLFLYYLQNGRDMYTGESLDINRLSDYDIDHVIPQAFIKDNSIDNRVLTSSKANRGKSDDVPSEDVVNRMRPFWNKLLSSGLISQRKYNNLTKKELTPDDKAGFIKRQLVETRQITKHVARMLDERFNKEFDDNNKRIRRVKIVTLKSNLVSSFRKEFELYKVREINDYHHAHDAYLNAVVVKALLVKYPKLEPEFVYGEYPKYNSYRERKTATQKMFFYSNIMNMFKSKVKLADDQIVERPMIEVNDETGEIAWDKTKHITTVKKVLSYPQVNIVKKVEEQTIGQNGGLFDDNPKSPLEVIPSKLVPLKKALNPEKYGGYQKPTTAYPILLIVDTKQLIPISVMDKKRFEQNPVKFLKDKGYQQIEKNNFVKLPKYTLVDIGNGIKRLWASSKEVHKGNQLVVSKKSQDLLYHAHHLDNDYSNEYVKNHYQQFDILFNEITSFSKKCKLGKEHIQKIEEAYSKERDSASIEELADGFIKLLGFTQLGATSPFSFLGIKLNQKQYTGKKDYLLPCMEATLIHQSITGLYETRIDLNKLGGD

SEQ ID NO: 285 - protein, 1330 aa, Enterococcus italicus
MKNDYTIGLDIGTNSVGYSVVTDDYKVISKKMNVFGNTEKKSIKKNFWGVRLFESGQTAQEARMKRTSRRRIARRKNRICYLQEIFQPEMNHLDNNFFYRLNESFLVADDAKYDKHPIFGTLDEEIHFHEQFPTIYHLRKYLADGDEKADLRLVYLAIAHIIKFRGNFLIEGELNTENNSVIELSKVFVQLYNQTLSELEGFQFIDESIDFSEVLTQQLSKSERADNVLKLFPDEKGTGIFAQFIKLIVGNQGNFKKVFQLEEDQKLQLSTDDYEENIENLLAIIGDEYGDIFVAAQNLYQAILLAGILTSTEKTRAKLSASMIQRYEEHAKDLKLLKRFVKEHIPDKYAEIFNDATKNGYAGYIDGKTKEEEFYKYLKTTLVQKSGYQYFIEKIEQENFLRKQRIYDNGVIPHQVHAEELRAILRKQEKYYSFLKENHEKIEQIFKVRIPYYVGPLAKHNEQSRFAWNIRKSDEPIRPWNMNDVVDENASAVAFIERMTIKDIYLNENVLPRHSLIYEKFTVFNELTKVLYADDRGVFQRFSAEEKEDIFEKLFKSERKVTKKKLENYLRIELSISSPSVKGIEEQFNANFGTYLDLKKFDELHPYLDDEKYQDTLEEVIKVLTVFEDRSMIQNQLEQLPLNLSTKTIKALSRRKYTGWGRLSARLIDGIHDKNSGKTILDYLIEDESDSYIVNRNFMQLINDDHLSFKKIIEDSQPYKEQQSAEEIVSELSGSPAIKKGILQSLKIVDELVAIMGYKPKNIVVEMARENQTTGRGKQNSKPRLKGIENGLKEFSDSVLKGSSIDNKQLQNDRLYLYYLQNGKDMYTGHELDIDHLSTYDIDHIIPQSFLTDNSIDNRVLTTSKSNRGKSDNVPSEEVVRKMDRFWRKLLNAKLISERKYTNLTKKELTESDKAGFLKRQLVETRQITKHVATILDSKFNEDSNNRDVQIITLKSALVSEFRKTFNLYKVREINDLHHAHDAYLNAVVALSLLRVYPQLKPEFVYGEYGKNSIHDQNKATIKKQFYSNITRYFASKDYIINDDGEILWNKQETIAQVIKTLGMHQVNVVKKVEIQKGGFSKESIQPKGESQKLIRRKQQWNTKKYGGFDSPVVAYAILLSFDKGKRKARSFKIVGITIQDRESFEGNPILYLSKKDYHNPKVEAILPKYSLFEFENGRRRMVASASETQKGNQLIIPGHLMELLYHSKKIINGKNSDSVSYIQNNKEKFREIFEYIVDFSSKYISADANLNKIEKIFENNFHKASEQEIAKSFINLLTFTAMGAPADFEFFGEKIPRKRYVSISEIIDAVFIHQSITGLYETRVRLTEV

SEQ ID NO: 286 - protein, 1334 aa, Listeria monocytogenes
MKNPYTIGLDIGTNSVGWAVLTDQYDLVKRKMKVAGNSDKKQIKKNFWGVRLFDDGQTAVDRRMNRTARRRIERRRNRISYLQEIFAVEMANIDANFFCRLNDSFYVDSEKRNSRHPFFATIEEEVAYHKNYRTIYHLREELVNSSEKADLRLVYLALAHIIKYRGNFLIEGALDTKNTSVDEVYKQFIQTYNQVFMSNIEEGALAKVEENTEVASILAGKFTRREKFERILRLYPGEKSTGMFAQFISLIVGNKGNFQKVFNLVEKTDIECAKDSYEEDLEALLAIIGDEYAELFVAAKNTYNAVVLSSIITVTATETNAKLSASMIERFDAHEKELGELKAFIKLHLPKQYQEIFNNAEIDGYAGYIDGKTKQVDFYKYLKTTLENVEGADYFITKIEEENFLRKQRTFDNGVIPHQLHLEELEAILHQQAKYYPFLREGYDKIKSLVTFRIPYFVGPLANGQSEFAWLTRKDDGEIRPWNIEEKVDFGKSAVDFIEKMTNKDTYLPKENVLPKHSLCYQKYMVYNELTKIRYIDDQGKTNYFSGREKQQIFNDLFKQKRKVKKKDLELFLRNINHIESPTIEGLEDSFNASYATYHDLLKVGLKQEILDNPLNTEILEDIVKILTVFEDKRMIKEQLEQFSDVLDGVVLKKLERRHYTGWGRLSAKLLVGIRDKQSHLTILDYLMNDDGLNRNLMQLINDSNLSFKSIIEKEQVSTTDKDLQSIVADLAGSPAIKKGILQSLKIVDELVSIMGYPPQTIVVEMARENQTTGKGKNNSKPRYKSLEKAIKDFGSQILKEHPTDNQELKNNRLYLYYLQNGKDIYTGQELDIHNLSNYDIDHIVPQSFITDNSIDNLVLTSSAGNREKGGDVPPLEIVRKRKVFWEKLYQGNLMSKRKFDYLTKAERGGLTEADKARFIHRQLVETRQITKNVANILHQRFNKETDNHGNTMEQVRIVTLKSALVSQFRKQFQLYKVREVNDYHHAHDAYLNGVVANTLLKVYPQLEPEFVYGEYHQFDWFKANKATAKKQFYTNIMLFFAQKERIIDENGEILWDKKYLETIKKVLDYRQINIVKKTEIQKGEFSKATIKPKGNSSKLIPRKENWDPMKYGGLDSPNMAYAVIIEHAKGKKKIVIEKKLIQINIMERKMFEKDEEAFLEEKGYHQPKVLTKLPKYTLYECEKGRRRMLSSANEAQKGNQLVLSNHLVSLLYHAKNCEASDGKSLKYIEAHRETFSELLAQVSEFATKYTLADANLSKINNLFEQNKEGDIKAIAQSFVDLMAFNAMGAPASFKFFEATIDRKRYTNLKELLSSTIIYQSITGLYESRKRLDD

SEQ ID NO: 287 - protein, 1334 aa, Listeria monocytogenes
MKNPYTIGLDIGTNSVGWAVLTDQYDLVKRKMKVAGNSDKKQIKKNFWGVRLFDDGQTAVDRRMNRTARRRIERRRNRISYLQEIFAVEMANIDANFFCRLNDSFYVDSEKRNSRHPFFATIEEEVAYHKNYRTIYHLREELVNSSEKADLRLVYLALAHIIKYRGNFLIEGALDTKNTSVDEVYKQFIQTYNQVFMSNIEEGALAKVEENTEVASILAGKFTRREKFERILRLYPGEKSTGMFAQFISLIVGNKGNFQKVFNLVEKTDIECAKDSYEEDLEALLAIIGDEYAELFVAAKNTYNAVVLSSIITVTATETNAKLSASMIERFDAHEKELGELKAFIKLHLPKQYQEIFNNAEIDGYAGYIDGKTKQVDFYKYLKTTLENVEGADYFITKIEEENFLRKQRTFDNGVIPHQLHLEELEAILHQQAKYYPFLREGYDKIKSLVTFRIPYFVGPLANGQSEFAWLTRKDDGEIRPWNIEEKVDFGKSAVDFIEKMTNKDTYLPKENVLPKHSLCYQKYMVYNELTKIRYIDDQGKTNYFSGREKQQIFNDLFKQKRKVKKKDLELFLRNINHIESPTIEGLEDSFNASYATYHDLLKVGLKQEILDNPLNTEILEDIVKILTVFEDKRMIKEQLEQFSDVLDGVVLKKLERRHYTGWGRLSAKLLVGIRDKQSHLTILDYLMNDDGLNRNLMQLINDSNLSFKSIIEKEQVSTTDKDLQSIVADLAGSPAIKKGILQSLKIVDELVSIMGYPPQTIVVEMARENQTTGKGKNNSKPRYKSLEKAIKDFGSQILKEHPTDNQELKNNRLYLYYLQNGKDIYTGQELDIHNLSNYDIDHIVPQSFITDNSIDNLVLTSSAGNREKGGDVPPLEIVRKRKVFWEKLYQGNLMSKRKFDYLTKAERGGLTEADKARFIHRQLVETRQITKNVANILHQRFNKETDNHGNTMEQVRIVTLKSALVSQFRKQFQLYKVREVNDYHHAHDAYLNGVVANTLLKVYPQLEPEFVYGEYHQFDWFKANKATAKKQFYTNIMLFFAQKERIIDENGEILWDKKYLETIKKVLDYRQINIVKKTEIQKGEFSKATIKPKGNSSKLIPRKENWDPVKYGGLDSPNMAYAVIIEHAKGKKKIVIEKKLIQINIMERKMFEKDEEAFLEEKGYHQPKVLTKLPKYTLYECEKGRRRMLSSANEAQKGNQLVLSNHLVSLLYHAKNCEASDGKSLKYIEAHRETFSELLAQVSEFATKYTLADANLSKINNLFEQNKEGDIKAIAQSFVDLMAFNAMGAPASFKFFEATIDRKRYTNLKELLSSTIIYQSITGLYESRKRLDD

SEQ ID NO: 288 - protein, 1334 aa, Listeria monocytogenes
MKNPYTIGLDIGTNSVGWAVLTDQYDLVKRKMKVAGNSDKKQIKKNFWGVRLFDDGQTAVDRRMNRTARRRIERRRNRISYLQEIFAVEMANIDANFFCRLNDSFYVDSEKRNSRHPFFATIEEEVAYHKNYRTIYHLREELVNSSEKADLRLVYLALAHIIKYRGNFLIEGALDTKNTSVDGVYEQFIQTYNQVFMSNIEEGTLAKVEENIEVANILAGKFTRREKFERILQLYPGEKSTGMFAQFISLIVGSKGNFQKVFDLIEKTDIECAKDSYEEDLETLLAIIGDEYAELFVAAKNTYNAVVLSSIITVNDTETNAKLSASMIERFDAHEKDLVELKAFIKLNLPKQYEEIFSNAAIDGYAGYIDGKTKQVDFYKYLKTILENIEGSDYFIAKIEEENFLRKQRTFDNGAIPHQLHLEELEAIIHQQAKYYTFLKEDYDKIKSLVTFRIPYFVGPLANGQSEFAWLTRKADGEIRPWNIEEKVDFGKSAVDFIEKMTNKDTYLPKENVLPKHSLCYQKYMVYNELTKVRYIDDQGKTNYFSGQEKQQIFNDLFKQKRKVKKKDLELFLRNINQIESPTIEGLEDSFNASYATYHDLLKVGMKQEILDNPLNTEMLEDIVKILTVFEDKRMIKEQLQQFSDVLDGVVLKKLERRHYTGWGRLSAKLLVGIRDKQSHLTILEYLMNDDGLNRNLMQLINDSNLSFKSIIEKEQVSTTDKDLQSIVAELAGSPAIKKGILQSLKIVDELVSIMGYPPQTIVVEMARENQTTGKGKNNSKPRYKSLEKAIKEFGSQILKEHPTDNQELKNNRLYLYYLQNGKDMYTGQELDIHNLSNYDIDHIVPQSFITDNSIDNLVLTSSAGNREKGGDVPPLEIVRKRKVFWEKLYQGNLMSKRKFDYLTKAERGGLTEADKARFIHRQLVETRQITKNVANILHQRFNKETDNHGNTMEQVRIVTLKSALVSQFRKQFQLYKVREVNDYHHAHDAYLNGVVANTLLKVYPQLEPEFVYGEYHQFDWFKANKATAKKQFYTNIMLFFAQKERIIDENGEILWDKKYLETIKKVLDYRQMNIVKKTEIQKGEFSKATIKPKGNSSKLIPRKENWDPMKYGGLDSPNMAYAVIIEHAKGKKRIVIEKKLIQINIMERKMFEKDEEAFLEEKGYRHPKVLTKLPKYTLYECEKGRRRMLASANEAQKGNQLVLSNHLVSLLYHAKNCEASDGKSLKYIEAHRETFSELLAQVSEFATRYTLADANLSKINNLFEQNKEGDIKAIAQSFVDLMAFNAMGAPASFKFFEATIDRKRYTNLKELLSSTIIYQSITGLYESRKRLDD

SEQ ID NO: 289 - protein, 1334 aa, Listeria monocytogenes
MKNPYTIGLDIGTNSVGWAVLTDQYDLVKRKMKVAGNSDKKQIKKNFWGVRLFDEGETAADRRMNRTARRRIERRRNRISYLQEIFALEMANIDANFFCRLNDSFYVDSEKRNSRHPFFATIEEEVAYHKNYRTIYHLREELVNSSEKADLRLVYLALAHIIKYRGNFLIEGALDTKNTSVDGVYKQFIQTYNQVFISNIEEGTLAKMEENTTVADILAGKFTRKEKLERILQLYPGEKSTGMFAQFISLIVGSKGNFQKVFDLVEKTDIECAKDSYEEDLEALLAIIGDEYAELFVAAKNTYNAVVLSSIITVTDTETNAKLSASMIERFDAHEKDLSELKAFIKLHLPKQYEEIFSNVAIDGYAGYIDGKTKQVDFYKYLKTLLENIEGADYFIAKIEEENFLRKQRTFDNGAIPHQLHLEELEAILHQQAKYYPFLKEAYDKIKSLVTFRIPYFVGPLANGQSDFAWLTRKADGEIRPWNIEEKVDFGKSAVDFIEKMTNKDTYLPKENVLPKHSLYYQKYMVYNELTKVRYIDDQGKTNYFSGQEKQQIFNDYFKQKRKVSKKDLEQFLRNMSHIESPTIEGLEDSFNSSYATYHDLLKVGIKQEVLENPLNTEMLEDIVKILTVFEDKRMIKEQLQQFSDVLDGAVLKKLERRHYTGWGRLSAKLLVGIRDKQSHLTILDYLMNDDGLNRNLMQLINDSNLSFKSIIEKEQVSTTDKDLQSIVADLAGSPAIKKGILQSLKIVDELVSIMGYPPQTIVVEMARENQTTVKGKNNSRPRYKSLEKAIKEFGSQILKEHPTDNQELRNNRLYLYYLQNGKDMYTGQELDIHNLSNYDIDHIVPQSFITDNSIDNLVLTSSAGNREKGDDVPPLEIVRKRKVFWEKLFQGNLMSKRKFDYLTKAERGGLTEADKATFIHRQLVETRQITKNVANILHQRFNNETDNHGNNMEQVRIVMLKSALVSQFRKQFQLYKVREVNDYHHAHDAYLNGVVANTLLKVYPQLEPEFVYGEYHQFDWFKANKATAKKQFYTNIMLFFAQKERIIDENGEILWDKKYLETIKKVLDYRQMNIVKKTEIQKGEFSKATIKPKGNSSKLIPRKENWDPMKYGGLDSPNMAYAVIIEHAKGKKKVVFEKKIIRITIMERKAFEKDEKSFLEKQGYRQPKVLTKLPKYTLYECENGRRRMLASANEAQKGNQQVLKGQLITLLHHAKNCEASDGKSLDYIESNREMFGELLAHVSEFAKRYTLADANLSKINQLFEQNKDNDIKVIAQSFVNLMAFNAMGAPASFKFFEATIERKRYTNLKELLSATIIYQSITGLYEARKRLDG

SEQ ID NO: 290 - protein, 1334 aa, Listeria monocytogenes
MKNPYTIGLDIGTNSVGWAVLTNQYDLVKRKMKVAGNSDKKQIKKNFWGVRLFDDGQTAVDRRMNRTARRRIERRRNRISYLQEIFAVEMANIDANFFCRLNDSFYVDSEKRNSRHPFFATIEEEVAYHDNYRTIYHLREKLVNSSEKADLRLVYLALAHIIKYRGNFLIEGALDTKNTSVDEVYKQFIETYNQVFMSNIEEGALAKVEENIEVANILAGKFTRREKFERILQLYPGEKSTGMFAQFISLIVGSKGNFQKVFDLIEKTDIECAKDSYEEDLETLLAIIGDEYAELFVAAKNTYNAVVLSSIITVTDTETNAKLSASMIERFDAHEKDLVELKAFIKLNLPKQYEEIFSNAAIDGYAGYIDGKTKQVDFYKYLKTILENIEGSDYFIAKIEEENFLRKQRTFDNGAIPHQLHLEELEAIIHQQAKYYPFLKEDYDKIKSLVTFRIPYFVGPLANGQSEFAWLTRKADGEIRPWNIEEKVDFGKSAVDFIEKMTNKDTYLPKENVLPKHSLCYQKYMVYNELTKIRYIDDQGKTNYFSGREKQQVFNDLFKQKRKVKKKDLELFLRNINHIESPTIEGLEDSFNASYATYHDLLKVGMKQEILDNPLNTEMLEDIVKILTVFEDKPMIKEQLQQFSDVLDGGVLKKLERRHYTGWGRLSAKLLVGIREKQSHLTILDYLMNDDGLNRNLMQLINDSNLSFKSIIEKEQVSTTDKDLQSIVAELAGSPAIKKGILQSLKIVDELVSIMGYPPQTIVVEMARENQTTGKGKNNSKPRYKSLEKAIKEFGSQILKEHPTDNQELKNNRLYLYYLQNGKDMYTGQELDIHNLSNYDIDHIVPQSFITDNSIDNLVLTSSAGNREKGGDVPPLEIVRKRKVFWEKLYQGNLMSKRKFDYLTKAERGGLTEADKARFIHRQLVETRQITKNVANILYQRFNKETDNHGNTMEQVRIVTLKSALVSQFRKQFQLYKVREVNGYHHAHDAYLNGVVANTLLKVYPQLEPEFVYGEYHQFDWFKANKATAKKQFYTNIMLFFAQKERIIDENGEILWDKKYLETIKKVLDYRQMNIVKKTEIQKGEFSKATIKPKGNSSKLIPRKENWDPMKYGGLDSPNMAYAVIIEHAKGKKKIVIEKKLIQINIMERKMFEKDEEAFLEEKGYRHPKVLTKLPKYTLYECEKGRRRMLASANEAQKGNQLVLSNHLVSLLYHAKNCEASDGKSLKYIEAHRETFSELLAQVSEFATRYTLADANLSKINNLFEQNKEGDIKAIAQSFVDLMAFNAMGAPASFKFFEATIDRKRYTNLKELLSSTIIYQSITGLYESRKRLDD

SEQ ID NO: 291 - protein, 1334 aa, Listeria monocytogenes
MKNPYTIGLDIGTNSVGWAVLTNQYDLVKRKMKVAGNSDKKQIKKNFWGVRLFDDGQTAVDRRMNRTARRRIERRRNRISYLQEIFAVEMANIDANFFCRLNDSFYVDSEKRNSRHPFFATIEEEVAYHKNYRTIYHLREELVNSSEKADLRLVYLALAHIIKYRGNFLIEGALDTKNTSVDGVYEQFILTYNQVFMSNIEEGTLAKVEENIEVANILAGKFTRREKFERILQLYPGEKSTGMFAQFISLIVGSKGNFQKVFDLIEKTDIECAKDSYEEDLETLLAIIGDEYAELFVAAKNTYNAVVLSSIITVTDTETNAKLSASMIERFDAHEKDLVELKAFIKLNLPKQYEEIFSNAAIDGYAGYIDGKTKQVDFYKYLKTTLENVEGADYFITKIEEENFLRKQRTFDNGVIPHQLHLEELEAILHQQAKYYPFLREDYEKIKSLVTFRIPYFVGPLAKGQSEFAWLTRKADGEIRPWNIEEKVDFGKSAVDFIEKMTNKDTYLPKENVLPKHSLCYQKYMVYNELTKIRYIDDQGKTNYFSGQEKQQIFNDLFKQKRKVKKKDLELFLRNINHVESPTIEGLEDSFNASYATYHDLMKVGIKQEILDNPLNTEMLEDIVKILTVFEDKRMIKEQLQQFSDVLDGTVLKKLERRHYTGWGRLSAKLLVGIRDKQSHLTILDYLMNDDGLNRNLMQLINDSNLSFKSIIEKEQVSTADKDLQSIVADLAGSPAIKKGILQSLKVVEELVSVMGYPPQTIVVEMARENQTTNKGKNNSKPRYKSLEKAIKEFGSQILKEHPTDNQELKNNRLYLYYLQNGKDMYTGQELDIHNLSNYDIDHIVPQSFITDNSIDNLVLTSSAGNREKGDNVPPLEIVQKRKIFWEKLYQGNLMSKRKFDYLTKAERGGLTEADKARFIHRQLVETRQITKNVANILHQRFNYKTDDNEDTMEPVRIVTLKSALVSQFRKQFQLYKVREVNDYHHAHDAYLNGVVANTLLKVYPQLEPEFVYGEYHQFDWFKANKATAKKQFYTNIMLFFAQKERIIDENGEILWDKKYLETIKKVLNYRQMNIVKKTEIQKGEFSNQNPKPRGDSSKLIPKKTNLNPIKYGGFEGSNMAYAIIIEHEKRKKKVTIEKKLIQINIMERKAFEKDEKVFLEGKGYHQPKVLTKLPKYALYECENGRRRMLGSANEVHKGNQMLLPNHLMTLLYHAEKREAIDGESLAYIEAHKAVFGELLAHISEFARKYTLANDKLDEINMLYERNKDGDVKSIAESFVSLKKFNAFGVHKDFNFFGTTIKRKRDRKLKELLNSTIIYQSITGLYESRKRLDS

SEQ ID NO: 292 - protein, 1334 aa, Listeria monocytogenes
MKNPYTIGLDIGTNSVGWAVLTNQYDLVKRKMKVAGNSDKKQIKKNFWGVRLFDDGQTAVDRRMNRTARRRIERRRNRISYLQEIFAVEMANIDANFFCRLNDSFYVDSEKRNSRHPFFATIEEEVAYHKNYRTIYHLREELVNSSEKADLRLVYLALAHIIKYRGNFLIEGALDTKNTSVDGVYEQFIQTYNQVFMSNIEEGTLAKVEENIEVANILAGKFTRREKFERILQLYPGEKSTGMFAQFISLIVGSKGNFQKVFDLIEKTDIECAKDSYEEDLEALLAIIGDEYAELFVAAKNTYNAVVLSSIITVTATETNAKLSASMIERFDAHEKDLGELKAFIKLHLPKQYQEIFNNAAIDGYAGYIDGKTKQVDFYKYLKTILENIEGADYFIAKIEEENFLRKQRTFDNGAIPHQLHLEELEAIIHQQAKYYPFLREDYEKIKSLVTFRIPYFVGPLAKGQSEFAWLTRKADGEIRPWNIEEKVDFGKSAVDFIEKMTNKDTYLPKENVLPKHSLCYQKYMVYNELTKVRYIDDQGKTNYFSGQEKQQIFNDLFKQKRKVKKKDLELFLRNINHIESPTIEGLEDSFNASYATYHDLLKVGMKQEILDNPLNTEMLEDIVKILTVFEDKPMIKEQLQQFSDVLDGGVLKKLERRHYTGWGRLSAKLLVGIREKQSHLTILDYLMNDDGLNRNLMQLINDSNLSFKSIIEKEQVSTTDKDLQSIVADLAGSPAIKKGILQSLKIVDELVSIMGYPPQTIVVEMARENQTTGKGKNNSKPRYKSLEKAIKEFGSKILKEHPTDNQELKNNRLYLYYLQNGKDMYTGQELDIHNLSNYDIDHIVPQSFITDNSIDNLVLTSSAGNREKGGDVPPLEIVRKRKVFWEKLYQGNLMSKRKFDYLTKAERGGLTDADKARFIHRQLVETRQITKNVANILHQRFNNETDNHGNTMEQVRIVTLKSALVSQFRKQFQLYKVREVNDYHHAHDAYLNGVVANTLLKVYPQLEPEFVYGEYHQFDWFKANKATAKKQFYTNIMLFFGQKERIIDENGEILWDKKYLETIKKVLDYRQMNIVKKTEIQKGEFSKATIKPKGNSSKLIPRKENWDPMKYGGLDSPNMAYAVIIEHAKGKKKLIFEKKIIRITIMERKMFEKDEEAFLEEKGYRHPKVLTKLPKYTLYECEKGRRRMLASANEAQKGNQLVLSNHLVSLLYHAKNCEASDGKSLKYIEAHRETFSELLAQVSEFATRYTLADANLSKINNLFEQNKEGDIQAIAQSFVDLMAFNAMGAPASFKFFEATIDRKRYTNLKELLSSTIIYQSITGLYESRKRLDD

SEQ ID NO: 293 - protein, 1334 aa, Listeria monocytogenes
MKNPYTIGLDIGTNSVGWAVLTNQYDLVKRKMKVAGNSDKKQIKKNFWGVRLFDDGQTAVDRRMNRTARRRIERRRNRISYLQEIFAVEMANIDANFFCRLNDSFYVDSEKRNSRHPFFATIEEEVAYHKNYRTIYHLREELVNSSEKADLRLVYLALAHIIKYRGNFLIEGALDTKNTSVDGVYEQFIQTYNQVFMSNIEEGTLAKVEENIEVANILARKFTRREKFERILQLYPGEKSTGMFAQFISLIVGSKGNFQKVFDLIEKTDIECAKDSYEEDLETLLAIIGDEYAELFVAAKNTYNAVVLSSIITVTDTETNAKLSASMIERFDAHEKDLVELKAFIKLNLPKQYEEIFSNAAIDGYAGYIDGKTKQVDFYKYLKTILENIEGADYFIAKIEEENFLRKQRTFDNGAIPHQLHLEELEAIIHQQAKYYPFLREDYEKIKSLVTFRIPYFVGPLAKGQSEFAWLTRKADGEIRPWNIEEKVDFGKSAVDFIEKMTNKDTYLPKENVLPKHSLCYQKYMVYNELTKIRYIDDQGKTNYFSGQEKQQIFNDLFKQKRKVKKKDLELFLRNINHVESPTIEGLEDSFNASYATYHDLMKVGIKQEILDNPLNTEMLEDIVKILTVFEDKRMIKEQLQQFSDVLDGTVLKKLERRHYTGWGRLSAKLLVGIRDKQSHLTILDYLMNDDGLNRNLMQLINDSNLSFKSIIEKEQVSTADKDLQSIVADLAGSPAIKKGILQSLKVVEELVSVMGYPPQTIVVEMARENQTTNKGKNNSKPRYKSLEKAIKEFGSQILKEHPTDNQELKNNRLYLYYLQNGKDMYTGQELDIHNLSNYDIDHIVPQSFITDNSIDNLVLTSSAGNREKGDNVPPLEIVQKRKIFWEKLYQGNLMSKRKFDYLTKAERGGLTEADKARFIHRQLVETRQITKNVANILHQRFNYKTDDNEDTMEPVRIVTLKSALVSQFRKQFQLYKVREVNDYHHAHDAYLNGVVANTLLKVYPQLEPEFVYGEYHQFDWFKANKATAKKQFYTNIMLFFAQKERIIDENGEILWDKKYLETIKKVLNYRQMNIVKKTEIQKGEFSNQNPKPRGDSSKLIPKKTNLNPIKYGGFEGSNMAYAIIIEHEKRKKKVTIEKKLIQINIMERKAFEKDEKVFLEGKGYHQPKVLTKLPKYALYECENGRRRMLGSANEVHKGNQMLLPNHLMTLLYHAEKREAIDGESLAYIEAHKAVFGELLAHISEFARKYTLANDKLDEINMLYERNKDGDVKSIAESFVSLKKFNAFGVHKDFNFFGTTIKRKRDRKLKELLNSTIIYQSITGLYESRKRLDS

SEQ ID NO: 294 - protein, 1335 aa, Unknown
  Clostridiales bacterium S5-A11
MKNYTIGLDIGTNSVGWAVIKDDLTLVRKKIKISGNTDKKEVKKNLWGSFLFEQGDTAQDTRVKRIARRRYERRRFRIRELQKIFDKSMGEVDSNFFHRLDESFLVEEDKEYSKYPIFSNEKEDKNYYDKYPTIYHLRKDLADSNQKADLRLIYLALAHMIKYRGHFLIEGDLKMDGISISESFQEFIDSYNEVCALEDENLEIIYNDELLTQIENIFKQDISRSKKLDQAIALFQGVKRQSLFGIFLTLIVGNKANFQKIFNLEDDIKLDLKEEDYDENLEELLSNIDEGYRDVFLQAKNVYNAIELSKILKTDGKETKAPLSAQMVELYNQHREDLKKYKDYIKAYLPEKYGETFKDATKNGYAGYIDGKTSQEDFYKFVKAQLKGEENGEYFLEAIENENFLRKQRSFYNGVIPYQIHLQELTAVLDQQEKHYSFLKENRDKIISLLTFRIPYYVGPLAKGESRFAWLERSNSEEKIKPWNFDKIVDIDKSAELFIENLTSRDTYLPDEPVLPKRSLIYQKFTIFNELTKISYIDERGILQNFSSREKIAIFNDLFKNKSKVTKNQLVKYIENKEQIIAPEIKGIEDSFNSNYSTYIDLSKIPDMKKLLEKDEDEILEEIIKILTIFEDRKMRKRQLMKFKDKLSEKAINQLSKKHYTGWGQLSEKLINGIRDEQSNKTILDYLIEDNGCPKNMNRNFMQLINDDTLSFKEKIRKAQDINQVNDIKEIVKDLPGSPAIKKGIYQSIRIVDEIIRKMKDRPKNIVIEMARENQTTQEGKNKSKARLKKIQEGLENLDSVHVEKQALDEEMLKSPKYYLYCLQNGKDIYTGKDLDIGQLQTYDIDHIIPRSFITDNSFDNLVLTSSTVNRGKLDNVPSPDIVRQQKGFWKQLLRAGLMSQRKFNNLTKGKLTDRDRQQFINRQLVETRQITKHVANLLSHHLNEKKEVGEINIVLLKSALTSQFRKKFDFYKVREVNDYHHAHDAYLNGVIALKLLELYPYMAKDLIYGKYSYHRKIEGDKATQAKYKMSNIIERFSQDLLANPDGEIAWEKDKDLNTIRKVLSSKQINIIKKAEEGKGRLFKETINSRPSKKTEKRIPIKNNLDPNIYGGYIEEKMAYYIAINYLENGKTKKAIVGISIKDKKDFEGQTTEYLGKIGFNKASIINSFKNYTLFELENGSRRMIVGASKENDSKGELQKGNQMYLPQNLLEFVYHLKHYNEDETSHKFIVEHKAYFDELLNYIVEFANKYLELENSIEKIKDLYHGKGPDVEEKELVESFINLLAITKCGPAADITFLGEKISRKRYRSTNCLWGSEVIFQSPTGLYETRLRLE

SEQ ID NO: 295 - protein, 1337 aa, Streptococcus parauberis
MKVLGNTDRQTVKKNMIGTLLFDSGETAEARRLKRTARRRYTRRINRIKYLQSIFDDEMSKIDSAFFQRIKDSFLVPDDKNDDRHPIFGNIKDEVDYHKNYPTIYHLRKKLADSDEKADLRLIYLALAHIIKFRGHFLIEGDLDSQNTDVNALFLKLVDTYNLMFEDDKIDTQTIDATVILTEKMSKSRRLENLIAKIPNQKKNTLFGNLISLSLGLTPNFKANFELSEDAKLQISKESFEEDLDNLLAQIGDQYADLFIAAKNLSDAILLSDILTVKGVNTKAPLSASMVQRFNEHQDDLKLLKKLVKVQLPEKYKEIFDIKDKNGYAGYINGKTSQEDFYKYIKPILSKLKGAESLISKLEREDFLRKQRTFDNGSIPHQIHLNELKSIIRRQEKYYPFLKDKQVRIEKIFTFRIPYFVGPLANGNSSFAWVKRRSNESITPWNFEEVVEQEASAKVFIERMTNFDTYLPEEKVLPKHSLLYEMFTVYNELTKVKYQAEGMRKPEFLSSEEKIEIVSNLFKTERKVTVKQLKENYFNKIRCLDSITISGVEDKFNASLGTYHDLLNIIKNQKILDDEQNQDSLEDIVLTLTLFEDEKMIAKRLSKYESIFDPSILKKLKKRHYTGWGRLSQKLINGIRDKQTGKTILDFLIEDGQANRNFMQLINDPSLDFASIIKEAQEKTIKSEKLEETIANLAGSPAIKKGILQSVKIVDEVVKVMGYEPSNIVIEMARENQSTQRGINNSRERLRKLEEVHKNIGSKILKEHEISNAQLQSDRVYLYLLQDGKDMYTGKDLDFDRLSQYDIDHIIPQSFIKDNSIDNIVLTSQESNRGKSDNVPYIAIVNKMKSYWQHQLKSGAISQRKFDNLTKAERGGLSEYDKAGFIKRQLVETRQITKHVAQILNNRFNNNVDDSSKNKRPVKIITLKSKMVSDFRKEFGFYKIREVNDYHHAHDAYLNAVVGTALLKKYPKLEAEFVYGDYKHYDLASLVVKSDTSLGKATAKMFFYSNIMNFFKKEVRLADGTVITRPQIETNTETGEIVWDKVKDIKTIRKVLSIPQINVVKKTEVQTGGFSKESILSKRDSDKLIPRKNNWDPKKYGGFGSPIIAYSVLVVAKVTKGKSQKTKSVKELVGITIMEQNEFEKDRITFLEKKGYQDIQESLIIKLPKFSLFELENGRKRLLASAKELQKGNELSLPNKYIQFLYLASRYTSFSGKEEDREKHRHFVESHLHYFDEIKDIIADFSRRYILADANLEKILTLYNEKNQFSIEEQATNMLNLFTFTGLGAPATLKFFNVDIDRKRYTSSTEILNSTLIRQSITGLYETRIDLSKIGGD

SEQ ID NO: 296 - protein, 1346 aa, Streptococcus anginosus
MMKKEYSIGLDIGTNSVGWAVITDDYKVPAKKMKVLGNTDKQSIKKNLLGALLFDSGETAEATRLKRTARRRYTRRKNRLRYLQEIFTEEMNKVDENFFQRLDDSFLVEEDKQGSKYPIFGTLKEEKEYHKKFKTIYHLREELANSKEKADLRLVYLALAHMIKFRGHFLYEGDLKAENTDVQALFKDFVEEYDKTIEESHLSEITVDALSILTEKVSKSSRLENLIAHYPTEKKNTLFGNLIALSLGLQPNFKTNFQLSEDAKLQFSKDTYEEDLEELLGEIGDEYADLFASAKNLYDAILLSGILAVDDNTTKAPLSASMVKRYEEHQKDLKKLKDFIKVNAPDQYNAIFKDKNKKGYAGYIESGVEQDEFYKYLKGILLKINGSGDFLDKIDCEDFLRKQRTFDNGSIPHQIHLQEMHAILRRQGEHYPFLKENQDKIEKILTFRIPYYVGPLARKGSRFAWAEYKADEKITPWNFDDILDKEKSAEKFITRMTLNDLYLPEEKVLPKHSPLYETFTVYNELTKVKYVNEQGEAKFFDTNMKQEIFDHVFKENRKVTKDKLLNYLNKEFEEFRIVNLTGLDKENKAFNSSLGTYHDLRKILDKSFLDDKANEKTIEDIIQTLTLFEDREMIRQRLQKYSDIFTKAQLKKLERRHYTGWGRLSYKLINGIRNKENKKTILDYLIDDGYANRNFMQLINDDALSFKEEIARAQIIGDVDDIANVVHDLPGSPAIKKGILQSVKIVDELVKVMGHNPANIIIEMARENQTTDKGRRNSQQRLKLLQDSLKNLDNPVNIKNVENQQLQNDRLFLYYIQNGKDMYTGETLDINNLSQYDIDHIIPQAFIKDNSLDNRVLTRSDKNRGKSDDVPSIEVVHEMKSFWSKLLSVKLITQRKFDNLTKAERGGLTEEDKAGFIKRQLVETRQITKHVAQILDERFNTEFDGAQRRIRNVKIITLKSNLVSNFRKEFELYKVREINDYHHAHDAYLNAVVGNALLLKYPQLEPEFVYGEYPKYNSYRSRKSATEKFLFYSNILRFFKKEDIQTNEDGEIAWNKEKHIKILRKVLSYPQVNIVKKTEEQTGGFSKESILPKGESDKLIPRKTKNSYWNPKKYGGFDSPVVAYSILVFADVEKGKSKKLRKVQDMVGITIMEKKRFEKNPVDFLEQRGYRNVRLEKIIKLPKYSLFELENKRRRLLASARELQKGNELVIPQRFTTLLYHSYQIEKNYEPEHREYVEKHKDEFKELLEYISVFSRKYVLADNNLTKIEMLFSKNKDAEVSSLAKSFISLLTFTAFGAPAAFNFFGENIDRKRYTSVTECLNATLIHQSITGLYETRIDLSKLGED

SEQ ID NO: 297 - protein, 1339 aa, Enterococcus villorum
MNKAYTLGLDIGTNSVGWAVVTDDYRLMAKKMPVHSKMEKKKIKKNFWGARLFDEGQTAEERRNKRATRRRLRRRKYRILELQKIFSEEILKKDSHFFARLDESFLIPEDKQYARFPIFPTLLEEKAYYQNYPTIYHLRQKLADSTEKADIRLVYLALAHMIKYRGHFLFEGELDTENTSVEETFKEFIDIYNEQFEEGIIFYKDIPLILTDKLSKSKKVEKILQYYPKEKTTGCLAQFLKLIVGNQGNFKQAFHLDEEVKIQISKETYEEDLEKLLRKSNEEMIDVFLQVKKVYDAILLSDILSTKMKDTKAKLSAGMIERYQNHKKDLEELKQFVRAHLHEKVTVFFKDSSKDGYAGYIDGKTTQADFYKFLKKELTGVPGSEPMLAKIDQENFLLKQRTPTNGVIPHQVHLTEFKAIIDQQKQYYPFLEKSKEKMIQLLTFRIPYYVGPLAQDKETSSFAWLERKTTEKIKPWNAKDVIDYGASATKFIQRMINYDTYLPTEKVLPKYSMLYQKYTIFNELTKVAYKDDRGIKHQFSSEEKLRIFQELFKKQRRVTKKKLQHFLSANYNIEDAEILGVDKVFNSSYATYHDFLELAKPYTEKIIELLEQPEMEEMFEDIVKIITIFEDREMVRTQLKKYQRILGEEIFKKLVKKKYTGWGRLSKRLINGIRDQKTNKTILDYLINDDDFPYNRNRNFMQLINDDHLSFKEEIAKELTLSDKQSLLEVVEAIPGSPAIKKGIWQTLKIVEELIAIIGYKPKNIVIEMARENQTTTGGKNRSKPRLKSLEEALKNFDSQLLKERPVDNQSLQKDRLYLYYLQNGKDMYTGESLDIDRLSEYDIDHIIPRSFIVDHSLDNKVLVSSKENRLKKDDVPDSKVVKRMKAYWEKLLRANLISERKFSYLTKLELTDDDKARFIQRQLVETRQITKHVAAILHQYFNQTQELEKEKDIRIITLKSSLVSQFRQVFGIHKVREINHHHHAHDAYLNAVVALALLKKYPRLAPEFVYGSFAKFHLVKENKATAKKEFYSNILKFFEKEEQFCDENGEIFWDKRKHIQQIKKVISSHQVNIVKKVEVQTGSFYKETVNTKEKPDKLIKRKNNWDVTKYGGFGSPVVAYAVVFTYEKGKNHKKAKAIEGITIMEQALFEKDPISFLIEKGYSNVNQFIKLPKYTLFELANGQRRMLASHQELQKANSFILPEKLVTLLYHANHYDEIAYKDSYDYVNEHFSNFQDILDKVIIFAEKYTSAPQKLNQIIATYEKNQEADRKIMAHSFVNLMQFNALGAPADFKFFDTTITRKRYTSLTEIWQSTIIYQSVTGLYETRRRMADLWDGVQ

SEQ ID NO: 298 - protein, 1370 aa, Streptococcus agalactiae
MNKPYSIGLDIGTNSVGWSIITDDYKVPAKKIRVLGNTDKEYIKKNLIGALLFDGGNTAADRRLKRTARRRYTRRRNRILYLQEIFAEEMSKVDDSFFHRLEDSFLVEEDKRGSKYPIFATLQEEKYYHEKFPTIYHLRKELADKKEKADLRLVYLALAHIIKFRGHFLIEDDRFDVRNTDIQKQYQAFLEIFDTTFENNDLLSQDVDVEAILTDKISKSAKKDRILAQYPNQKSTGIFAEFLKLIVGNQADFKKHFNLEDKTPLQFAKDSYDEDLENLLGQIGDEFADLFSAAKKLYDSVLLSGILTVTDLSTKAPLSASMIQRYDEHREDLKQLKQFVKASLPEKYQEIVADSSKDGYAGYIEGKTNQEAFYKYLSKLLTKQEGSEYFLEKIKNEDFLRKQRTFDNGSIPHQVHLTELRAIIRRQSEYYPFLKENLDRIEKILTFRIPYYVGPLAREKSDFAWMTRKTDDSIRPWNFEDLVDKEKSAEAFIHRMTNNDLYLPEEKVLPKHSLIYEKFTVYNELTKVRFLAEGFKDFQFLNRKQKETIFNSLFKEKRKVTEKDIISFLNKVDGYEGIAIKGIEKQFNASLSTYHDLKKILGKDFLDNTDNELILEDIVQTLTLFEDREMIKKRLDIYKDFFTESQLKKLYRRHYTGWGRLSAKLINGIRNKENQKTILDYLIDDGSANRNFMQLIKDAGLSFKPIIDKARTGSHSDNLKEVIGELAGSPAIKKGILQSLKIVDELVKVMGYEPEQIVVEMARENQTTAKGLSRSRQRLTTLRESLANLKSNILEEKKPKYVKDQVENHHLSDDRLFLYYLQNGKDMYTDDELDIDNLSQYDIDHIIPQAFIKDDSIDNRVLVSSAKNRGKSDDVPSLEIVKDCKVFWKKLLDAKLMSQRKYDNLTKAERGGLTSDDKARFIQRQLVETRQITKHVARILDERFNNELDSKGRRIRKVKIVTLKSNLVSNFRKEFVFYKIREVNNYHHAHDAYLNAVVAKAILTKYPQLEPEFVYGDYPKYNSYKTRKSATEKLFFYSNIMNFFKTKVTLADGTVVVKDDIEVNNDTGEIVWDKKKHFATVRKVLSYPQVNIVKKTEIQTGGFSKESILAHGNSDKLIPRKTKDIYLDPKKYGGFDSPIVAYSVLVVADIKKGKAQKLKTVTELLGITIMERSRFEKNPSAFLESKGYLNIRTDKLIILPKYSLFELENGRRRLLASAGELQKGNELALPTQFMKFLYLASRYNESKGKPEEIEKKQEFVNQHVSYFDDIFQIINDFSKRVILADANLEKINRLYQDNKENIPVDELANNIINLFTFTSLGAPAAFKFFDKIVDRKRYTSTKEVLNSTLIHQSITGLYETRIDLGKLGED

SEQ ID NO: 299 - protein, 1370 aa, Streptococcus agalactiae
MNKPYSIGLDIGTNSVGWSIITDDYKVPAKKMRVLGNTDKEYIKKNLIGALLFDGGNTAADRRLKRTARRRYTRRRNRILYLQEIFAEEMSKVDDSFFHRLEDSFLVEEDKRGSKYPIFATLQEEKDYHEKFPTIYHLRKELADKKEKADLRLIYIALAHIIKFRGHFLIEDDSFDVRNTDISKQYQDFLEIFNTTFENNDLLSQNVDVEAILTDKISKSAKKDRILAQYPNQKSTGIFAEFLKLIVGNQADFKKYFNLEDKTPLQFAKDSYDEDLENLLGQIGDEFADLFSAAKKLYDSVLLSGILTVIDLSTKAPLSASMIQRYDEHREDLKQLKQFVKASLPEKYQEIFADSSKDGYAGYIEGKTNQEAFYKYLSKLLTKQEDSENFLEKIKNEDFLRKQRTFDNGSIPHQVHLTELKAIIRRQSEYYPFLKENQDRIEKILTFRIPYYIGPLAREKSDFAWMTRKTDDSIRPWNFEDLVDKEKSAEAFIHRMTNNDFYLPEEKVLPKHSLIYEKFTVYNELTKVRYKNEQGETYFFDSNIKQEIFDGVFKEHRKVSKKKLLDFLAKEYEEFRIVDVIGLDKENKAFNASLGTYHDLEKILDKDFLDNPDNESILEDIVQTLTLFEDREMIKKRLENYKDLFTESQLKKLYRRHYTGWGRLSAKLINGIRDKESQKTILDYLIDDGRSNRNFMQLINDDGLSFKSIISKAQAGSHSDNLKEVVGELAGSPAIKKGILQSLKIVDELVKVMGYEPEQIVVEMARENQTTNQGRRNSRQRYKLLDDGVKNLASDLNGNILKEYPTDNQALQNERLFLYYLQNGRDMYTGEALDIDNLSQYDIDHIIPQAFIKDDSIDNRVLVSSAKNRGKSDDVPSLEIVKDCKVFWKKLLDAKLMSQRKYDNLTKAERGGLTSDDKARFIQRQLVETRQITKHVARILDERFNNELDSKGRRIRKVKIVTLKSNLVSNFRKEFGFYKIREVNNYHHAHDAYLNAVVAKAILTKYPQLEPEFVYGDYPKYNSYKTRKSATEKLFFYSNIMNFFKTKVTLADGTVVVKDDIEVNNDTGEIVWDKKKHFATVRKVLSYPQNNIVKKTEIQTGGFSKESILAHGNSDKLIPRKTKDIYLDPKKYGGFDSPIVAYSVLVVADIKKGKAQKLKTVTELLGITIMERSRFEKNPSAFLESKGYLNIRADKLIILPKYSLFELENGRRRLLASAGELQKGNELALPTQFMKFLYLASRYNESKGKPEEIEKKQEFVNQHVSYFDDILQLINDFSKRVILADANLEKINKLYQDNKENISVDELANNIINLFTFTSLGAPAAFKFFDKIVDRKRYTSTKEVLNSTLIHQSITGLYETRIDLGKLGED

SEQ ID NO: 300 - protein, 1378 aa, Streptococcus agalactiae
MNKPYSIGLDIGTNSVGWSIITDDYKVPAKKMRVLGNTDKEYIKKNLIGALLFDGGNTAADRRLKRTARRRYTRRRNRILYLQEIFAEEMSKVDDSFFHRLEDSFLVEEDKRGSKYPIFATLQEEKDYHEKFPTIYHLRKELADKQEKADLRLIYLALAHIIKFRGHFLIEDDRFDVRNTDIQKQYQAFLEIFDTTFENNHLLSQNVDVEAILTDKISKSAKKDRILAQYPNQKSTGIFAEFLKLIVGNQADFKKHFNLEDKTPLQFAKDSYDEDLENLLGQIGDEFADLFSAAKKLYDSVLLSGILTVIDLSTKAPLSASMIQRYDEHREDLKQLKQFVKASLPEKYQEIFADSSKDGYAGYIEGKTNQEAFYKYLSKLLTKQEDSENFLEKIKNEDFLRKQRTFDNGSIPHQVHLTELKAIIRRQSEYYPFLKENQDRIEKILTFRIPYYIGPLAREKSDFAWMTRKTDDSIRPWNFEDLVDKEKSAEAFIHRMTNNDFYLPEEKVLPKHSLIYEKFTVYNELTKVRYKNEQGETYFFDSNIKQEIFDGVFKEHRKVSKKKLLDFLAKEYEEFRIVDVIGLDKENKAFNASLGTYHDLEKILDKDFLDNPDNESILEDIVQTLTLFEDREMIKKRLENYKDLFTESQLKKLYRRHYTGWGRLSAKLINGIRDKESQKTILDYLIDDGRSNRNFMQLINDDGLSFKSIISKAQAGSHSDNLKEVVGELAGSPAIKKGILQSLKIVDELVKVMGYEPEQIVVEMARENQTTNQGRRNSRQRYKLLDDGVKNLASDLNGNILKEYPTDNQALQNERLFLYYLQNGRDMYTGEALDIDNLSQYDIDHIIPQAFIKDDSIDNRVLVSSAKNRGKSDDVPSLEIVKDCKVFWKKLLDAKLMSQRKYDNLTKAERGGLTSDDKARFIQRQLVETRQITKHVARILDERFNNELDSKGRRIRKVKIVTLKSNLVSNFRKEFGFYKIREVNDYHHAHDAYLNAVVAKAILTKYPQLEPEFVYGLYRRKKLSKIVREDKEEKYSEATRKMFFYSNLMNMFKRVVRLADGSIVVRPVIETGRYMGKTAWDKKKHFATVRKVLSYPQVNIVKKTEIQTGGFSKESILAHGNSDKLIPRKTKDIYLDPKKYGGFDSPIVAYSVLVVADIKKGKAQKLKTVTELLGITIMERSKFEKNPSAFLESKGYLNIRDDKLMILPKYSLFELENGRRRLLASAGELQKGNELALPTQFMKFLYLASRYNESKGKPEEIEKKQEFVNQHVSYFDDILQLINDFSKRVILADANLEKINKLYQDNKENISVDELANNIINLFTFTSLGAPAAFKFFDKIVDRKRYTSTKEVLNSTLIHQSITGLYETRIDLSKLGED

SEQ ID NO: 301 - protein, 1370 aa, Streptococcus agalactiae
MNKPYSIGLDIGTNSVGWSIITDDYKVPAKKMRVLGNTDKEYIKKNLIGALLFDGGNTAADRRLKRTARRRYTRRRNRILYLQEIFAEEMSKVDDSFFHRLEDSFLVEEDKRGSKYPIFATLQEEKDYHEKFSTIYHLRKELADKKEKADLRLIYIALAHIIKFRGHFLIEDDSFDVRNTDISKQYQDFLEIFNITFENNDLLSQNVDVEAILTDKISKSAKKDRILAQYPNQKSTGIFAEFLKLIVGNQADFKKYFNLEDKTPLQFAKDSYDEDLENLLGQIGDEFADLFSAAKKLYDSVLLSGILTVIDLSTKAPLSASMIQRYDEHREDLKQLKQFVKASLPEKYQEIFADSSKDGYAGYIEGKTNQEAFYKYLSKLLTKQEDSENFLEKIKNEDFLRKQRTFDNGSIPHQVHLTELKAIIRRQSEYYPFLKENQDRIEKILTFRIPYYIGPLAREKSDFAWMTRKTDDSIRPWNFEDLVDKEKSAEAFIHRMTNNDFYLPEEKVLPKHSLIYEKFTVYNELTKVRYKNEQGETYFFDSNIKQEIFDGVFKEHRKVSKKKLLDFLAKEYEEFRIVDVIGLDKENKAFNASLGTYHDLEKILDKDFLDNPDNESILEDIVQTLTLFEDREMIKKRLENYKDLFTESQLKKLYRRHYTGWGRLSAKLINGIRDKESQKTILDYLIDDGRSNRNFMQLINDDGLSFKSIISKAQAGSHSDNLKEVVGELAGSPAIKKGILQSLKIVDELVKVMGYEPEQIVVEMARENQTTNQGRRNSRQRYKLLDDGVKNLASDLNGNILKEYPTDNQALQNERLFLYYLQNGRDMYTGEALDIDNLSQYDIDHIIPQAFIKDDSIDNRVLVSSAKNRGKSDDVPSLEIVKDCKVFWKKLLDAKLMSQRKYDNLTKAERGGLTSDDKARFIQRQLVETRQITKHVARILDERFNNELDSKGRRIRKVKIVTLKSNLVSNFRKEFGFYKIREVNNYHHAHDAYLNAVVAKAILTKYPQLEPEFVYGDYPKYNSYKTRKSATEKLFFYSNIMNFFKTKVTLADGTVVVKDDIEVNNDTGEIVWDKKKHFATVRKVLSYPQNNIVKKTEIQTGGFSKESILAHGNSDKLIPRKTKDIYLDPKKYGGFDSPIVAYSVLVVADIKKGKAQKLKTVTELLGITIMERSRFEKNPSAFLESKGYLNIRADKLIILPKYSLFELENGRRRLLASAGELQKGNELALPTQFMKFLYLASRYNESKGKPEEIEKKQEFVNQHVSYFDDILQLINDFSKRVILADANLEKINKLYQDNKENISVDELANNIINLFTFTSLGAPAAFKFFDKIVDRKRYTSTKEVLNSTLIHQSITGLYETRIDLGKLGED

SEQ ID NO: 302 - protein, 1370 aa, Streptococcus agalactiae
MNKPYSIGLDIGTNSVGWSIITDDYKVPAKKMRVLGNTDKEYIKKNLIGALLFDGGNTAADRRLKRTARRRYTRRRNRILYLQEIFAEEMSKVDDSFFHRLEDSFLVEEDKRGSKYPIFATLQEEKDYHEKFSTIYHLRKELADKKEKADLRLIYIALAHIIKFRGHFLIEDDSFDVRNTDISKQYQDFLEIFNTIFENNDLLSQNVDVEAILTDKISKSAKKDRILAQYPNQKSTGIFAEFLKLIVGNQADFKKYFNLEDKTPLQFAKDSYDEDLENLLGQIGDEFADLFSAAKKLYDSVLLSGILTVIDLSTKAPLSASMIQRYDEHREDLKQLKQFVKASLPEKYQEIFADSSKDGYAGYIEGKTNQEAFYKYLSKLLTKQEDSENFLEKIKNEDFLRKQRTFDNGSIPHQVHLTELKAIIRRQSEYYPFLKENQDRIEKILTFRIPYYIGPLAREKSDFAWMTRKTDDSIRPWNFEDLVDKEKSAEAFIHRMTNNDFYLPEEKVLPKHSLIYEKFTVYNELTKVRYKNEQGETYFFDSNIKQEIFDGVFKEHRKVSKKKLLDFLAKEYEEFRIVDVIGLDKENKAFNASLGTYHDLEKILDKDFLDNPDNESILEDIVQTLTLFEDREMIKKRLENYKDLFTESQLKKLYRRHYTGWGRLSAKLINGIRDKESQKTILDYLIDDGRSNRNFMQLINDDGLSFKSIISKAQAGSHSDNLKEVVGELAGSPAIKKGILQSLKIVDELVKVMGYEPEQIVVEMARENQTTNQGRRNSRQRYKLLDDGVKNLASDLNGNILKEYPTDNQALQNERLFLYYLQNGRDMYTGEALDIDNLSQYDIDHIIPQAFIKDDSIDNRVLVSSAKNRGKSDDVPSLEIVKDCKVFWKKLLDAKLMSQRKYDNLTKAERGGLTSDDKARFIQRQLVETRQITKHVARILDERFNNELDSKGRRIRKVKIVTLKSNLVSNFRKEFGFYKIREVNNYHHAHDAYLNAVVAKAILTKYPQLEPEFVYGDYPKYNSYKTRKSATEKLFFYSNIMNFFKTKVTLADGTVVVKDDIEVNNDTGEIVWDKKKHFATVRKVLSYPQNNIVKKTEIQTGGFSKESILAHGNSDKLIPRKTKDIYLDPKKYGGFDSPIVAYSVLVVADIKKGKAQKLKTVTELLGITIMERSRFEKNPSAFLESKGYLNIRADKLIILPKYSLFELENGRRRLLASAGELQKGNELALPTQFMKFLYLASRYNESKGKPEEIEKKQEFVNQHVSYFDDILQLINDFSKRVILADANLEKINKLYQDNKENISVDELANNIINLFTFTSLGAPAAFKFFDKIVDRKRYTSTKEVLNSTLIHQSITGLYETRIDLGKLGED

SEQ ID NO: 303 - protein, 1370 aa, Streptococcus agalactiae
MNKPYSIGLDIGTNSVGWSIITDDYKVPAKKMRVLGNTDKEYIKKNLIGALLFDGGNTAADRRLKRTARRRYTRRRNRILYLQEIFAEEMSKVDDSFFHRLEDSFLVEEDKRGSKYPIFATLQEEKDYHEKFSTIYHLRKELADKKEKADLRLIYIALAHIIKFRGHFLIEDDSFDVRNTDISKQYQDFLEIFNTTFENNDLLSQNVDVEAILTDKISKSAKKDRILAQYPNQKSTGIFAEFLKLIVGNQADFKKYFNLEDKTPLQFAKDSYDEDLENLLGQIGDEFADLFSAAKKLYDSVLLSGILTVIDLSTKAPLSASMIQRYDEHREDLKQLKQFVKASLPEKYQEIFADSSKDGYAGYIEGKTNQEAFYKYLSKLLTKQEDSENFLEKIKNEDFLRKQRTFDNGSIPHQVHLTELKAIIRRQSEYYPFLKENQDRIEKILTFRIPYYIGPLAREKSDFAWMTRKTDDSIRPWNFEDLVDKEKSAEAFIHRMTNNDFYLPEEKVLPKHSLIYEKFTVYNELTKVRYKNEQGETYFFDSNIKQEIFDGVFKEHRKVSKKKLLDFLAKEYEEFRIVDVIGLDKENKAFNASLGTYHDLEKILDKDFLDNPDNESILEDIIQTLTLFEDREMIKKRLENYKDLFTESQLKKLYRRHYTGWGRLSAKLINGIRDKESQKTILDYLIDDGRSNRNFMQLINDDGLSFKSIISKAQAGSHSDNLKEVVGELAGSPAIKKGILQSLKIVDELVKVMGYEPEQIVVEMARENQTTNQGRRNSRQRYKLLDDGVKNLASDLNGNILKEYPTDNQALQNERLFLYYLQNGRDMYTGEALDIDNLSQYDIDHIIPQAFIKDDSIDNRVLVSSAKNRGKSDDVPSLEIVKDCKVFWKKLLDAKLMSQRKYDNLTKAERGGLTSDDKARFIQRQLVETRQITKHVARILDERFNNELDSKGRRIRKVKIVTLKSNLVSNFRKEFGFYKIREVNNYHHAHDAYLNAVVAKAILTKYPQLEPEFVYGDYPKYNSYKTRKSATEKLFFYSNIMNFFKTKVTLADGTVVVKDDIEVNNDTGEIVWDKKKHFATVRKVLSYPQNNIVKKTEIQTGGFSKESILAHGNSDKLIPRKTKDIYLDPKKYGGFDSPIVAYSVLVVADIKKGKAQKLKTVTELLGITIMERSRFEKNPSAFLESKGYLNIRADKLIILPKYSLFELENGRRRLLASAGELQKGNELALPTQFMKFLYLASRYNESKGKPEEIEKKQEFVNQHVSYFDDILQLINDFSKRVILADANLEKINKLYQDNKENISVDELANNIINLFTFTSLGAPAAFKFFDKIVDRKRYTSTKEVLNSTLIHQSITGLYETRIDLGKLGED

SEQ ID NO: 304 - protein, 1370 aa, Streptococcus agalactiae
MNKPYSIGLDIGTNSVGWSIITDDYKVPAKKMRVLGNTDKEYIKKNLIGALLFDGGNTAADRRLKRTARRRYTRRRNRILYLQEIFAEEMSKVDDSFFHRLEDSFLVEEDKRGSKYPIFATLQEEKDYHEKFSTIYHLRKELADKKEKADLRLIYIALAHIIKFRGHFLIEDDSFDVRNTDISKQYQDFLEIFNTTFENNDLLSQNVDVEAILTDKISKSAKKDRILAQYPNQKSTGIFAEFLKLIVGNQADFKKYFNLEDKTPLQFAKDSYDEDLENLLGQIGDEFADLFSAAKKLYDSVLLSGILTVIDLSTKAPLSASMIQRYDEHREDLKQLKQFVKASLPEKYQEIFADSSKDGYAGYIEGKTNQEAFYKYLSKLLTKQEDSENFLEKIKNEDFLRKQRTFDNGSIPHQVHLTELKAIIRRQSEYYPFLKENQDRIEKILTFRIPYYIGPLAREKSDFAWMTRKTDDSIRPWNFEDLVDKEKSAEAFIHRMTNNDFYLPEEKVLPKHSLIYEKFTVYNELTKVRYKNEQGETYFFDSNIKQEIFDGVFKEHRKVSKKKLLDFLAKEYEEFRIVDVIGLDKENKAFNASLGTYHDLEKILDKDFLDNPDNESILEDIVQTLTLFEDREMIKKRLENYKDLFTESQLKKLYRRHYTGWGRLSAKLINGIRDKESQKTILDYLIDDGRSNRNFMQLINDDGLSFKSIISKAQAGSHSDNLKEVVGELAGSPAIKKGILQSLKIVDELVKVMGYEPEQIVVEMARENQTTNQGRRNSRQRYKLLDDGVKNLASDLNGNILKEYPTDNQALQNERLFLYYLQNGRDMYTGEALDIDDLSQYDIDHIIPQAFIKDDSIDNRVLVSSAKNRGKSDDVPSLEIVKDCKVFWKKLLDAKLMSQRKYDNLTKAERGGLTSDDKARFIQRQLVETRQITKHVARILDERFNNELDSKGRRIRKVKIVTLKSNLVSNFRKEFGFYKIREVNNYHHAHDAYLNAVVAKAILTKYPQLEPEFVYGDYPKYNSYKTRKSATEKLFFYSNIMNFFKTKVTLADGTVVVKDDIEVNNDTGEIVWDKKKHFATVRKVLSYPQNNIVKKTEIQTGGFSKESILAHGNSDKLIPRKTKDIYLDPKKYGGFDSPIVAYSVLVVADIKKGKAQKLKTVTELLGITIMERSRFEKNPSAFLESKGYLNIRADKLIILPKYSLFELENGRRRLLASAGELQKGNELALPTQFMKFLYLASRYNESKGKPEEIEKKQEFVNQHVSYFDDILQLINDFSKRVILADANLEKINKLYQDNKENISVDELANNIINLFTFTSLGAPAAFKFFDKIVDRKRYTSTKEVLNSTLIHQSITGLYETRIDLGKLGED

SEQ ID NO: 305 - protein, 1370 aa, Streptococcus agalactiae
MNKPYSIGLDIGTNSVGWSIITDDYKVPAKKMRVLGNTDKEYIKKNLIGALLFDGGNTAADRRLKRTARRRYTRRRNRILYLQEIFAEEMSKVDDSFFHRLEDSFLVEEDKRGSKYPIFATLQEEKDYHEKFSTIYHLRKELADKKEKADLRLIYIALAHIIKFRGHFLIEDDSFDVRNTDISKQYQDFLEIFNTTFENNDLLSQNVDVEAILTDKISKSAKKDRILAQYPNQKSTGIFAEFLKLIVGNQADFKKYFNLEDKTPLQFAKDSYDEDLENLLGQIGDEFADLFSAAKKLYDSVLLSGILTVIDLSTKAPLSASMIQRYDEHREDLKQLKQFVKASLPEKYQEIFADSSKDGYAGYIEGKTNQEAFYKYLSKLLTKQEDSENFLEKIKNEDFLRKQRTFDNGSIPHQVHLTELKAIIRRQSEYYPFLKENQDRIEKILTFRIPYYIGPLAREKSDFAWMTRKTDDSIRPWNFEDLVDKEKSAEAFIHRMTNNDFYLPEEKVLPKHSLIYEKFTVYNELTKVRYKNEQGETYFFDSNIKQEIFDGVFKEHRKVSKKKLLDFLAKEYEEFRIVDVIGLDKENKAFNASLGTYHDLEKILDKDFLDNPDNESILEDIVQTLTLFEDREMIKKRLENYKDLFTESQLKKLYRRHYTGWGRLSAKLINGIRDKESQKTILDYLIDDGRSNRNFMQLINDDGLSFKSIISKAQAGSHSDNLKEVVGELAGSPAIKKGILQSLKIVDELVKVMGYEPEQIVVEMARENQTTNQGRRNSRQRYKLLDDGVKNLASDLNGNILKEYPTDNQALQNERLFLYYLQNGRDMYTGEALDIDNLSQYDIDHIIPQAFIKDDSIDNRVLVSSAKNRGKSDDVPSLEIVKDCKVFWKKLLDAKLMSQRKYDNLTKAERGGLTSDDKARFIQRQLVETRQITKHVARILDERFNNELDSKGRRIRKVKIVTLKSNLVSNFRKEFGFYKIREVNNYHHAHDAYLNAVVAKAILTKYPQLEPEFVYGDYPKYNSYKTRKSATEKLFFYSNIMNFFKTKVTLADGTVVVKDDIEVNNDTGEIVWDKKKHFATVRKVLSYPQNNIVKKTEIQTGGFSKESILAHGNSDKLIPRKTKDIYLDPKKYGGFDSPIVAYSVLVVADIKKGKAQKLKTVTELLGITIMERSRFEKNPSAFLESKGYLNIRADKLIILPKYSLFELENGRRRLLASAGELQKGNELALPTQFMKFLYLASRYNESKGKPEEIEKKQEFVNQHVSYFDDILQLINDFSKRVILADANLEKINKLYQDNKENISVDELANNIINLFTFTSLGAPAAFKFFDKIVDRKRYTSTKEVLNSTLIHQSITGLYETRIDLGKLGED

SEQ ID NO: 306 - protein, 1370 aa, Streptococcus agalactiae
MNKPYSIGLDIGTNSVGWSIITDDYKVPAKKMRVLGNTDKEYIKKNLIGALLFDGGNTAADRRLKRTARRRYTRRRNRILYLQEIFAEEMSKVDDSFFHRLEDSFLVEEDKRGSKYPIFATLQEEKDYHEKFSTIYHLRKELADKKEKADLRLIYIALAHIIKFRGHFLIEDDSFDVRNTDISKQYQDFLEIFNTTFENNDLLSQNVDVEAILTDKISKSAKKDRILAQYPNQKSTGIFAEFLKLIVGNQADFKKYFNLEDKTPLQFAKDSYDEDLENLLGQIGDEFADLFSAAKKLYDSVLLSGILTVIDLSTKAPLSASMIQRYDEHREDLKQLKQFVKASLPEKYQEIFADSSKDGYAGYIEGKTNQEAFYKYLSKLLTKQEDSENFLEKIKNEDFLRKQRTFDNGSIPHQVHLTELKAIIRRQSEYYPFLKENQDRIEKILTFRIPYYIGPLAREKSDFAWMTRKTDDSIRPWNFEDLVDKEKSAEAFIHRMTNNDFYLPEEKVLPKHSLIYEKFTVYNELTKVRYKNEQGETYFFDSNIKQEIFDGVFKEHRKVSKKKLLDFLAKEYEEFRIVDVIGLDKENKAFNASLGTYHDLEKILDKDFLDNPDNESILEDIVQTLTLFEDREMIKKRLENYKDLFTESQLKKLYRRHYTGWGRLSAKLINGIRDKESQKTILDYLIDDGRSNRNFMQLINDDGLSFKSIISKAQAGSHSDNLKEVVGELAGSPAIKKGILQSLKIVDELVKVMGYEPEQIVVEMARENQTTNQGRRNSRQRYKLLDDGVKNLASDLNGNILKEYPTDNQALQNERLFLYYLQNGRDMYTGEALDIDNLSQYDIDHIIPQAFIKDDSIDNRVLVSSAKNRGKSDDVPSLEIVKDCKVFWKKLLDAKLMSQRKYDNLTKAERGGLTSDDKARFIQRQLVETRQITKHVARILDERFNNELDSKGRRIRKVKIVTLKSNLVSNFRKEFGFYKIREVNNYHHAHDAYLNAVVAKAILTKYPQLEPEFVYGDYPKYNSYKTRKSATEKLFFYSNIMNFFKTKVTLADGTVVVKDDIEVNNDTGEIVWDKKKHFATVRKVLSYPQNNIVKKTEIQTGGFSKESILAHGNSDKLIPRKTKDIYLDPKKYGGFDSPIVAYSVLVVADIKKGKAQKLKTVTELLGITIMERSRFEKNPSAFLESKGYLNIRADKLIILPKYSLFELENGRRRLLASAGELQKGNELALPTQFMKFLYLASRYNESKGKPEEIEKKQEFVNQHVSYFDDILQLINDFSKRVILADANLEKINKLYQDNKENISVDELANNIINLFTFTSLGAPAAFKFFDKIVDRKRYTSTKEVLNSTLIHQSITGLYETRIDLGKLGGD

SEQ ID NO: 307 - protein, 1370 aa, Streptococcus agalactiae
MNKPYSIGLDIGTNSVGWSIITDDYKVPAKKMRVLGNTDKEYIKKNLIGALLFDGGNTAADRRLKRTARRRYTRRRNRILYLQEIFAEEMSKVDDSFFHRLEDSFLVEEDKRGSKYPIFATLQEEKDYHEKFSTIYHLRKELADKKEKADLRLIYIALAHIIKFRGHFLIEDDSFDVRNTDISKQYQDFLEIFNTTFENNDLLSQNVDVEAILTDKISKSAKKDRILAQYPNQKSTGIFAEFLKLIVGNQADFKKYFNLEDKTPLQFAKDSYDEDLENLLGQIGDEFADLFSAAKKLYDSVLLSGILTVIDLSTKAPLSASMIQRYDEHREDLKQLKQFVKASLPEKYQEIFADSSKDGYAGYIEGKTNQEAFYKYLSKLLTKQEDSENFLEKIKNEDFLRKQRTFDNGSIPHQVHLTELKAIIRRQSEYYPFLKENQDRIEKILTFRIPYYIGPLAREKSDFAWMTRKTDDSIRPWNFEDLVDKEKSAEAFIHRMTNNDFYLPEEKVLPKHSLIYEKFTVYNELTKVRYKNEQGETYFFDSNIKQEIFDGVFKEHRKVSKKKLLDFLAKEYEEFRIVDVIGLDKENKAFNASLGTYHDLEKILDKDFLDNPDNESILEDIVQTLTLFEDREMIKKRLENYKDLFTESQLKKLYRRHYTGWGRLSAKLINGIRDKESQKTILDYLIDDGRSNRNFMQLINDDGLSFKSIISKAQAGSHSDNLKEVVGELAGSPAIKKGILQSLKIVDELVKVMGYEPEQIVVEMARENQTTNQGRRNSRQRYKLLDDGVKNLASDLNGNILKEYPTDNQALQNERLFLYYLQNGRDMYTGEALDIDNLSQYDIDHIIPQAFIKDDSIDNRVLVSSAKNRGKSDDVPSLEIVKDCKVFWKKLLDAKLMSQRKYDNLTKAERGGLTSDDKARFIQRQLVETRQITKHVARILDERFNNELDSKGRRIRKVKIVTLKSNLVSNFRKEFGFYKIREVNNYHHAHDAYLNAVVAKAILTKYPQLEPEFVYGDYPKYNSYKTRKSATEKLFFYSNIMNFFKTKVTLADGTVVVKDDIEVNNDTGEIVWDKKKHFATVRKVLSYPQNNIVKKTEIQTGGFSKESILAHGNSDKLIPRKTKDIYLDPKKYGGFDSPIVAYSVLVVADIKKGKAQKLKTVTELLGITIMERSRFEKNPSAFLESKGYLNIRDDKLMILPKYSLFELENGRRRLLASAGELQKGNELALPTQFMKFLYLASRYNESKGKPEEIEKKQEFVNQHVSYFDDILQLINDFSKRVILADANLEKINKLYQDNKENISVDELANNIINLFTFTSLGAPAAFKFFDKIVDRKRYTSTKEVLNSTLIHQSITGLYETRIDLGKLGED

SEQ ID NO: 308 - protein, 1370 aa, Streptococcus agalactiae
MNKPYSIGLDIGTNSVGWSIITDDYKVPAKKMRVLGNTDKEYIKKNLIGALLFDGGNTAADRRLKRTARRRYTRRRNRILYLQEIFAEEMSKVDDSFFHRLEDSFLVEEDKRGSKYPIFATLQEEKDYHEKFSTIYHLRKELADKKEKADLRLIYIALAHIIKFRGHFLIEDDSFDVRNTDISKQYQDFLEIFNTTFENNDLLSQNVDVEAILTDKISKSAKKDRILAQYPNQKSTGIFAEFLKLIVGNQADFKKYFNLEDKTPLQFAKDSYDEDLENLLGQIGDEFADLFSAAKKLYDSVLLSGILTVIDLSTKAPLSASMIQRYDEHREDLKQLKQFVKASLPEKYQEIFADSSKDGYAGYIEGKTNQEAFYKYLSKLLTKQEDSENFLEKIKNEDFLRKQRTFDNGSIPHQVHLTELKAIIRRQSEYYPFLKENQDRIEKILTFRIPYYIGPLAREKSDFAWMTRKTDDSIRPWNFEDLVDKEKSAEAFIHRMTNNDFYLPEEKVLPKHSLIYEKFTVYNELTKVRYKNEQGETYFFDSNIKQEIFDGVFKEHRKVSKKKLLDFLAKEYEEFRIVDVIGLDKENKAFNASLGTYHDLEKILDKDFLDNPDNESILEDIVQTLTLFEDREMIKKRLENYKDLFTESQLKKLYRRHYTGWGRLSAKLINGIRDKESQKTILDYLIDDGRSNRNFMQLINDDGLSFKSIISKAQAGSHSDNLKEVVGELAGSPAIKKGILQSLKIVDELVKVVGYEPEQIVVEMARENQTTNQGRRNSRQRYKLLDDGVKNLASDLNGNILKEYPTDNQALQNERLFLYYLQNGRDMYTGEALDIDNLSQYDIDHIIPQAFIKDDSIDNRVLVSSAKNRGKSDDVPSLEIVKDCKVFWKKLLDAKLMSQRKYDNLTKAERGGLTSDDKARFIQRQLVETRQITKHVARILDERFNNELDSKGRRIRKVKIVTLKSNLVSNFRKEFGFYKIREVNNYHHAHDAYLNAVVAKAILTKYPQLEPEFVYGDYPKYNSYKTRKSATEKLFFYSNIMNFFKTKVTLADGTVVVKDDIEVNNDTGEIVWDKKKHFATVRKVLSYPQNNIVKKTEIQTGGFSKESILAHGNSDKLIPRKTKDIYLDPKKYGGFDSPIVAYSVLVVADIKKGKAQKLKTVTELLGITIMERSRFEKNPSAFLESKGYLNIRADKLIILPKYSLFELENGRRRLLASAGELQKGNELALPTQFMKFLYLASRYNESKGKPEEIEKKQEFVNQHVSYFDDILQLINDFSKRVILADANLEKINKLYQDNKENISVDELANNIINLFTFTSLGAPAAFKFFDKIVDRKRYTSTKEVLNSTLIHQSITGLYETRIDLGKLGED

SEQ ID NO: 309 - protein, 1370 aa, Streptococcus agalactiae
MNKPYSIGLDIGTNSVGWSIITDDYKVPAKKMRVLGNTDKEYIKKNLIGALLFDGGNTAADRRLKRTARRRYTRRRNRILYLQEIFAEEMSKVDDSFFHRLEDSFLVEEDKRGSKYPIFATLQEEKDYHEKFSTIYHLRKELADKKEKADLRLIYIALAHIIKFRGHFLIEDDSFDVRNTDISKQYQDFLEIFNTTFENNDLLSQNVDVEAILTDKISKSAKKDRILAQYPNQKSTGIFAEFLKLIVGNQADFKKYFNLEDKTPLQFAKDSYDEDLENLLRQIGDEFADLFSAAKKLYDSVLLSGILTVIDLSTKAPLSASMIQRYDEHREDLKQLKQFVKASLPEKYQEIFADSSKDGYAGYIEGKTNQEAFYKYLSKLLTKQEDSENFLEKIKNEDFLRKQRTFDNGSIPHQVHLTELKAIIRRQSEYYPFLKENQDRIEKILTFRIPYYIGPLAREKSDFAWMTRKTDDSIRPWNFEDLVDKEKSAEAFIHRMTNNDFYLPEEKVLPKHSLIYEKFTVYNELTKVRYKNEQGETYFFDSNIKQEIFDGVFKEHRKVSKKKLLDFLAKEYEEFRIVDVIGLDKENKAFNASLGTYHDLEKILDKDFLDNPDNESILEDIVQTLTLFEDREMIKKRLENYKDLFTESQLKKLYRRHYTGWGRLSAKLINGIRDKESQKTILDYLIDDGRSNRNFMQLINDDGLSFKSIISKAQAGSHSDNLKEVVGELAGSPAIKKGILQSLKIVDELVKVMGYEPEQIVVEMARENQTTNQGRRNSRQRYKLLDDGVKNLASDLNGNILKEYPTDNQALQNERLFLYYLQNGRDMYTGEALDIDNLSQYDIDHIIPQAFIKDDSIDNRVLVSSAKNRGKSDDVPSLEIVKDCKVFWKKLLDAKLMSQRKYDNLTKAERGGLTSDDKARFIQRQLVETRQITKHVARILDERFNNELDSKGRRIRKVKIVTLKSNLVSNFRKEFGFYKIREVNNYHHAHDAYLNAVVAKAILTKYPQLEPEFVYGDYPKYNSYKTRKSATEKLFFYSNIMNFFKTKVTLADGTVVVKDDIEVNNDTGEIVWDKKKHFATVRKVLSYPQNNIVKKTEIQTGGFSKESILAHGNSDKLIPRKTKDIYLDPKKYGGFDSPIVAYSVLVVADIKKGKAQKLKTVTELLGITIMERSRFEKNPSAFLESKGYLNIRADKLIILPKYSLFELENGRRRLLASAGELQKGNELALPTQFMKFLYLASRYNESKGKPEEIEKKQEFVNQHVSYFDDILQLINDFSKRVILADANLEKINKLYQDNKENISVDELANNIINLFTFTSLGAPAAFKFFDKIVDRKRYTSTKEVLNSTLIHQSITGLYETRIDLGKLGED

SEQ ID NO: 310 - protein, 1370 aa, Streptococcus agalactiae
MNKPYSIGLDIGTNSVGWSIITDDYKVPAKKMRVLGNTDKEYIKKNLIGALLFDGGNTAADRRLKRTARRRYTRRRNRILYLQEIFAEEMSKVDDSFFHRLEDSFLVEEDKRGSKYPIFATLQEEKDYHEKFSTIYHLRKELADKKEKADLRLIYIALAHIIKFRGHFLIEDDSFDVRNTDISKQYQDFLEIFNTTFENNDLLSQNVDVEAILTDKISKSAKKDRILAQYPNQKSTGIFAEFLKLIVGNQADFKKYFNLEDKTPLQFAKDSYDEDLENLLGQIGDEFADLFSAAKKLYDSVLLSGILTVIDLSTKAPLSASMIQRYDEHREDLKQLKQFVKASLPEKYQEIFADSSKDGYAGYIEGKTNQEAFYKYLSKLLTKQEDSENFLEKIKNEDFLRKQRTFDNGSIPHQVHLTELKAIIRRQSEYYPFLKENQDRIEKILTFRIPYYIGPLAREKSDFAWMTRKTDDSIRPWNFEDLVDKEKSAEAFIHRMTNNDFYLPEEKVLPKHSLIYEKFTVYNELTKVRYKNEQGETYFFDSNIKQEIFDGVFKEHRKVSKKKLLDFLAKEYEEFRIVDVIGLDKENKAFNASLGTYHDLEKILDKDFLDNPDNESILEDIVQTLTLFEDREMIKKRLENYKDLFTESQLKKLYRRHYTGWGRLSAKLINGIRDKESQKTILDYLIDDGRSNRNFMQLINDDGLSFKSIISKAQAGSHSDNLKEVVGELAGSPAIKKGILQSLKIVDELVKVMGYEPEQIVVEMARENQTTNQGRRNSRQRYKLLDDGVKNLASDLNGNILKEYPTDNQALQNERLFLYYLQNGRDMYTGEALDIDNLSQYDIDHIIPQAFIKDDSIDNRVLVSSAKNRGKSDDVPSLEIVKDCKVFWKKLLDAKLMSQRKYDNLTKAERGGLTSDDKARFIQRQLVETRQITKHVARILDERFNNELDSKGRRIRKVKIVTLKSNLVSNFRKEFGFYKIREVNNYHHAHDAYLNAVVAKAILTKYPQLEPEFVYGDYPKYNSYKTRKSATEKLFFYSNIMNFFKTKVTLADGTVVVKDDIEVNNDTGEIVWDKKKHFATVRKVLSYPQNNIVKKTEIQTGGFSKESILAHGNSDKLIPRKTKDIYLDPKKYGGFDSPIVAYSVLVAADIKKGKAQKLKTVTELLGITIMERSRFEKNPSAFLESKGYLNIRADKLIILPKYSLFELENGRRRLLASAGELQKGNELALPTQFMKFLYLASRYNESKGKPEEIEKKQEFVNQHVSYFDDILQLINDFSKRVILADANLEKINKLYQDNKENISVDELANNIINLFTFTSLGAPAAFKFFDKIVDRKRYTSTKEVLNSTLIHQSITGLYETRIDLGKLGED

SEQ ID NO: 311 - protein, 1370 aa, Streptococcus agalactiae
MNKPYSIGLDIGTNSVGWSIITDDYKVPAKKMRVLGNTDKEYIKKNLIGALLFDGGNTAADRRLKRTARRRYTRRRNRILYLQEIFAEEMSKVDDSFFHRLEDSFLVEEDKRGSKYPIFATLQEEKDYHEKFSTIYHLRKELADKKEKADLRLIYIALAHIIKFRGHFLIEDDSFDVRNTDISKQYQDFLEIFNTTFENNDLLSQNVDVEAILTDKISKSAKKDRILAQYPNQKSTGIFAEFLKLIVGNQADFKKYFNLEDKTPLQFAKDSYDEDLENLLGQIGDEFADLFSAAKKLYDSVLLSGILTVIDLSTKAPLSASMIQRYDEHREDLKQLKQFVKASLPEKYQEIFADSSKDGYAGYIEGKTNQEAFYKYLSKLLTKQEDSENFLEKIKNEDFLRKQRTFDNGSIPHQVHLTELKAIIRRQSEYYPFLKENQDRIEKILTFRIPYYIGPLAREKSDFAWMTRKTDDSIRPWNFEDLVDKEKSAEAFIHRMTNNDFYLPEEKVLPKHSLIYEKFTVYNELTKVRYKNEQGETYFFDSNIKQEIFDGVFKEHRKVSKKKLLDFLAKEYEEFRIVDVIGLDKENKAFNASLGTYHDLEKILDKDFLDNPDNESILEDIVQTLTLFEDREMIKKRLENYKDLFTESQLKKLYRRHYTGWGRLSAKLINGIRDKESQKTILDYLIDDGRSNRNFMQLINDDGLSFKSIISKAQAGSHSDNLKEVVGELAGSPAIKKGILQSLKIVDELVKVMGYEPEQIVVEMARENQTTNQGRRNSRQRYKLLDDGVKNLASDLNGNILKEYPTDNQALQNERLFLYYLQNGRDMYTGEALDIDNLSQYDIDHIIPQAFIKDDSIDNRVLVSSAKNRGKSDDVPSLEIVKDCKVFWKKLLDAKLMSQRKYDNLTKAERGGLTSDDKARFIQRQLVETRQITKHVARILDERFNNELDSKGRRIRKVKIVTLKSNLVSNFRKEFGFYKIREVNNYHHAHDAYLNAVVAKAILTKYPQLEPEFVYGDYPKYNSYKTRKSATEKLFFYSNIMNFFKTKVTLADGTVVIKDDIEVNNDTGEIVWDKKKHFATVRKVLSYPQNNIVKKTEIQTGGFSKESILAHGNSDKLIPRKTKDIYLDPKKYGGFDSPIVAYSVLVVADIKKGKAQKLKTVTELLGITIMERSRFEKNPSAFLESKGYLNIRADKLIILPKYSLFELENGRRRLLASAGELQKGNELALPTQFMKFLYLASRYNESKGKPEEIEKKQEFVNQHVSYFDDILQLINDFSKRVILADANLEKINKLYQDNKENISVDELANNIINLFTFTSLGAPAAFKFFDKIVDRKRYTSTKEVLNSTLIHQSITGLYETRIDLGKLGED

SEQ ID NO: 312 - protein, 1370 aa, Streptococcus agalactiae
MNKPYSIGLDIGTNSVGWSIITDDYKVPAKKMRVLGNTDKEYIKKNLIGALLFDGGNTAADRRLKRTARRRYTRRRNRILYLQEIFAEEMSKVDDSFFHRLEDSFLVEEDKRGSKYPIFATLQEEKDYHEKFSTIYHLRKELADKKEKADLRLIYIALAHIIKFRGHFLIEDDSFDVRNTDISKQYQDFLEIFNTTFENNDLLSQNVDVEAILTDKISKSAKKDRILAQYPNQKSTGIFAEFLKLIVGNQADFKKYFNLEDKTPLQFAKDSYDEDLENLLGQIGDEFADLFSAAKKLYDSVLLSGILTVIDLSTKAPLSASMIQRYDEHREDLKQLKQFVKASLPEKYQEIFADSSKDGYAGYIEGKTNQEAFYKYLSKLLTKQEDSENFLEKIKNEDFLRKQRTFDNGSIPHQVHLTELKAIIRRQSEYYPFLKENQDRIEKILTFRIPYYIGPLAREKSDFAWMTRKTDDSIRPWNFEDLVDKEKSAEAFIHRMTNNDFYLPEEKVLPKHSLIYEKFTVYNELTKVRYKNEQGETYFFDSNIKQEIFDGVFKEHRKVSKKKLLDFLAKEYEEFRIVDVIGLDKENKAFNASLGTYHDLEKILDKDFLDNPDNESILEDIVQTLTLFEDREMIKKRLENYKDLFTESQLKKLYRRHYTGWGRLSAKLINGIRDKESQKTILDYLIDDGRSNRNFMQLINDDGLSFKSIISKAQAGSHSDNLKEVVGELAGSPAIKKGILQSLKIVDELVKVMGYEPEQIVVEMARENQTTNQGRRNSRQRYKLLDDGVKNLASDLNGNILKEYPTDNQALQNERLFLYYLQNGRDMYTGEALDIDNLSQYDIDHIIPQAFIKDDSIDNRVLVSSAKNRGKSDDVPSLEIVKDCKVFWKKLLDAKLMSQRKYDNLTKAERGGLTSDDKARFIQRQLVETRQITKHVASILDERFNNELDSKGRRIRKVKIVTLKSNLVSNFRKEFGFYKIREVNNYHHAHDAYLNAVVAKAILTKYPQLEPEFVYGDYPKYNSYKTRKSATEKLFFYSNIMNFFKTKVTLADGTVVVKDDIEVNNDTGEIVWDKKKHFATVRKVLSYPQNNIVKKTEIQTGGFSKESILAHGNSDKLIPRKTKDIYLDPKKYGGFDSPIVAYSVLVVADIKKGKAQKLKTVTELLGITIMERSRFEKNPSAFLESKGYLNIRADKLIILPKYSLFELENGRRRLLASAGELQKGNELALPTQFMKFLYLASRYNESKGKPEEIEKKQEFVNQHVSYFDDILQLINDFSKRVILADANLEKINKLYQDNKENISVDELANNIINLFTFTSLGAPAAFKFFDKIVDRKRYTSTKEVLNSTLIHQSITGLYETRIDLGKLGED

SEQ ID NO: 313 - protein, 1370 aa, Streptococcus agalactiae
MNKPYSIGLDIGTNSVGWSIITDDYKVPAKKMRVLGNTDKEYIKKNLIGALLFDGGNTAADRRLKRTARRRYTRRRNRILYLQEIFAEEMSKVDDSFFHRLEDSFLVEEDKRGSKYPIFATLQEEKDYHEKFSTIYHLRKELADKKEKADLRLIYIALAHIIKFRGHFLIEDDSFDVRNTDISKQYQDFLEIFNTTFENNDLLSQNVDVEAILTDKISKSAKKDRILAQYPNQKSTGIFAEFLKLIVGNQADFKKYFNLEDKTPLQFAKDSYDEDLENLLGQIGDEFADLFSAAKKLYDSVLLSGILTVIDLSTKAPLSASMIQRYDEHREDLKQLKQFVKASLPEKYQEIFADSSKDGYAGYIEGKTNQEAFYKYLSKLLTKQEDSENFLEKIKNEDFLRKQRTFDNGSIPHQVHLTELKAIIRRQSEYYPFLKENQDRIEKILTFRIPYYIGPLAREKSDFAWMTRKTDDSIRPWNFEDLVDKEKSAEAFIHRMTNNDFYLPEEKVLPKHSLIYEKFTVYNELTKVRYKNEQGETYFFDSNIKQEIFDGVFKEHRKVSKKKLLDFLAKEYEEFRIVDVIGLDKENKAFNASLGTYHDLEKILDKDFLDNPDNESILEDIVQTLTLFEDREMIKKRLENYKDLFTESQLKKLYRRHYTGWGRLSAKLINGIRDKESQKTILDYLIDDGRSNRNFMQLINDDGLSFKSIISKAQAGSHSDNLKEVVGELAGSPAIKKGILQSLKIVDELVKVMGYEPEQIVVEMARENQTTNQGRRNSRQRYKLLDDGVKNLASDLNGNILKEYPTDNQALQNERLFLYYLQNGRDMYTGEALDIDNLSQYDIDHIIPQAFIKDDSIDNRVLVSSAKNRGKSDDVPSLEIVKDCKVFWKKLLDAKLMSQRKYDNLTKAERGGLTSDDKARFIQRQLVETRQITKHVARILDERFNNELDSKGRRIRKVKIVTLKSNLVSNFRKEFGFYKIREVNNYHHAHDAYLNAVVAKAILTKYPQLEPEFVYGDYPKYNSYKTRKSATEKLFFYSNIMNFFKTKVTLADGTVVVKDDIEVNNDTGEIVWDKKKHFATVRKVLSYPQNNIVKKTEIQTGGFSKESILAHGNSDKLIPRKTKDIYLDPKKYGGFDSPIVAYSVLVVADIKKGKAQKLKTVTELLGITIMERSRFEKNLSAFLESKGYLNIRADKLIILPKYSLFELENGRRRLLASAGELQKGNELALPTQFMKFLYLASRYNESKGKPEEIEKKQEFVNQHVSYFDDILQLINDFSKRVILADANLEKINKLYQDNKENISVDELANNIINLFTFTSLGAPAAFKFFDKIIDRKRYTSTKEVLNSTLIHQSITGLYETRIDLGKLGED

SEQ ID NO: 314 - protein, 1370 aa, Streptococcus agalactiae
MNKPYSIGLDIGTNSVGWSIITDDYKVPAKKMRVLGNTDKEYIKKNLIGALLFDGGNTAADRRLKRTARRRYTRRRNRILYLQEIFAEEMSKVDDSFFHRLEDSFLVEEDKRGSKYPIFATLQEEKDYHEKFSTIYHLRKELADKKEKADLRLIYIALAHIIKFRGHFLIEDDSFDVRNTDISKQYQDFLEIFNTTFENNDLLSQNVDVEAILTDKISKSAKKDRILAQYPNQKSTGIFAEFLKLIVGNQADFKKYFNLEDKTPLQFAKDSYDEDLENLLGQIGDEFADLFSAAKKLYDSVLLSGILTVIDLSTKAPLSASMIQRYDEHREDLKQLKQFVKASLPEKYQEIFADSSKDGYAGYIEGKTNQEAFYKYLSKLLTKQEDSENFLEKIKNEDFLRKQRTFDNGSIPHQVHLTELKDIIRRQSEYYPFLKENQDRIEKILTFRIPYYIGPLAREKSDFAWMTRKTDDSIRPWNFEDLVDKEKSAEAFIHRMTNNDFYLPEEKVLPKHSLIYEKFTVYNELTKVRYKNEQGETYFFDSNIKQEIFDGVFKEHRKVSKKKLLDFLAKEYEEFRIVDVIGLDKENKAFNASLGTYHDLEKILDKDFLDNPDNESILEDIVQTLTLFEDREMIKKRLENYKDLFTESQLKKLYRRHYTGWGRLSAKLINGIRDKESQKTILDYLIDDGRSNRNFMQLINDDGLSFKSIISKAQAGSHSDNLKEVVGELAGSPAIKKGILQSLKIVDELVKVMGYEPEQIVVEMARENQTTNQGRRNSRQRYKLLDDGVKNLASDLNGNILKEYPTDNQALQNERLFLYYLQNGRDMYTGEALDIDNLSQYDIDHIIPQAFIKDDSIDNRVLVSSAKNRGKSDDVPSLEIVKDCKVFWKKLLDAKLMSQRKYDNLTKAERGGLTSDDKARFIQRQLVETRQITKHVARILDERFNNELDSKGRRIRKVKIVTLKSNLVSNFRKEFGFYKIREVNNYHHAHDAYLNAVVAKAILTKYPQLEPEFVYGDYPKYNSYKTRKSATEKLFFYSNIMNFFKTKVTLADGTVVVKDDIEVNNDTGEIVWDKKKHFATVRKVLSYPQNNIVKKTEIQTGGFSKESILAHGNSDKLIPRKTKDIYLDPKKYGGFDSPIVAYSVLVVADIKKGKAQKLKTVTELLGITIMERSRFEKNPSAFLESKGYLNIRADKLIILPKYSLFELENGRRRLLASAGELQKGNELALPTQFMKFLYLASRYNESKGKPEEIEKKQEFVNQHVSYFDDILQLINDFSKRVILADANLEKINKLYQDNKENISVDELANNIINLFTFTSLGAPAAFKFFDKIVDRKRYTSTKEVLNSTLIHQSITGLYETRIDLGKLGED

SEQ ID NO: 315 - protein, 1370 aa, Streptococcus agalactiae
MNKPYSIGLDIGTNSVGWSIITDDYKVPAKKMRVLGNTDKEYIKKNLIGALLFDGGNTAADRRLKRTARRRYTRRRNRILYLQEIFAEEMSKVDDSFFHRLEDSFLVEEDKRGSKYPIFATMQEEKDYHEKFPTIYHLRKELADKKEKADLRLVYLALAHIIKFRGHFLIEDDRFDVRNTDIQKQYQAFLEIFDTSFENNHLLSQNVDVEAILTDKISKSAKKDRILAQYPNQKSTGIFAEFLKLIVGNQADFKKHFNLEDKTPLQFAKDSYDEDLENLLGQIGDEFADLFSAAKKLYDSVLLSGILTVTDLSTKAPLSAYMIQRYDEHREDLKQLKQFVKASLPEKYQEIFADSSKDGYAGYIEGKTNQEAFYKYLSKLLTKQEDSEYFLEKIKNEDFLRKQRTFDNGSIPHQVHLTELKAIIRRQSEYYPFLKENQDKIEKILTFRIPYYVGPLARGNSDFAWMTRKTDDSIRPWNFEDLVDKEKSAEAFIHRMTNNDLYLPEEKVLPKHSLIYEKFTVYNELTKVRYKNEQGETYFFDSNVKQEIFDGVFKEHRKVSKKQLLDFLAKEFEEFRIVDVTGLDKENKAFNASLGTYHDLKKILDKDFLDNPDNESILEDIVQTITLFEDREMIKKRLENYKDLFTESQLKKLYRRHYTGWGRLSAKLINGIRDRESQKTILDYLISDGRANRNFMQLINDDGLSFKSIISKAQSGSHSDNLKEVVGELAGSPAIKKGILQSLKIVDELVKVMGYEPEQIVVEMARENQTTNQGRRNSRQRYKLLEDGVKNLASDLNGDILKEYPTDNQALQNERLFLYYLQNGRDMYTGEALDIDNLSQYDIDHIVPQAFIKDDSIDNRVLVSSAKNRGKSDDVPSIDIVKARKAFWKKLLDAKLISQRKYDNLTKAERGGLTPDDKAGFIQRQLVETRQITKHVARILDERFNNKVDDNNKPIRKVKIVTLKSNLVSNFRKEFGFYKIREVNNYHHAHDAYLNAVVAKAILTKYPQLEPEFVYGDYPKYNSYKTRKSATEKLFFYSNIMNFFKTKVTLADETVVVKDDIEVNNETGEIAWDKKKHFATVRKVLSYPQVNIVKKTEVQTGGFSKESILAHSNSDKLIPRKTKDIYLDPKKYGGFDSPIVAYSVLVLADIKKGKAQKLKTVKELIGITIMERERFEKNPSAFLESKGYLNIRTDKLIILPKYSLFELENGRRRLLASAGELQKGNELALPTQYMKFLYLASRYNESKGKPEEIEKKQEFVNQHISYFDDILQLINDFSKRVILADANLEKINKLYSDNKDNTPVDELAKNIINLFTFTSLGAPAAFKFFDKSVDRKRYTSTKEVLDSTLIHQSITGLYETRIDLGKLGED

SEQ ID NO: 316 - protein, 1370 aa, Streptococcus agalactiae
MNKPYSIGLDIGTNSVGWSIITDDYKVPAKKMRVLGNTDKEYIKKNLIGALLFDGGNTAADRRLKRTARRRYTRRRNRILYLQEIFAEEMSKVDDSFFHRLEDSFLVEEDKRGSKYPIFATMQEEKDYHEKFPTIYHLRKELADKKEKADLRLVYLALAHIIKFRGHFLIEDDRFDVRNTDIQKQYQAFLEIFDTSFENNHLLSQNVDVEAILTDKISKSAKKDRILAQYPNQKSTGIFAEFLKLIVGNQADFKKHFNLEDKTPLQFAKDSYDEDLENLLGQIGDEFADLFSAAKKLYDSVLLSGILTVTDLSTKAPLSASMIQRYDEHREDLKQLKQFVKASLPEKYQEIFADSSKDGYAGYIEGKTNQEAFYKYLSKLLTKQEDSEYFLEKIKNEDFLRKQRTFDNGSIPHQVHLTELKAIIRRQSEYYPFLKENQDKIEKILTFRIPYYVGPLARGNSDFAWMTRKTDDSIRPWNFEDLVDKEKSAEAFIHRMTNNDLYLPEEKVLPKHSLIYEKFTVYNELTKVRYKNEQGETYFFDSNVKQEIFDGVFKEHRKVSKKQLLDFLAKEFEEFRIVDVTGLDKENKAFNASLGTYHDLKKILDKDFLDNPDNESILEDIVQTITLFEDREMIKKRLENYKDLFTESQLKKLYRRHYTGWGRLSAKLINGIRDRESQKTILDYLISDGRANRNFMQLINDDGLSFKSIISKAQSGSHSDNLKEVVGELAGSPAIKKGILQSLKIVDELVKVMGYEPEQIVVEMARENQTTNQGRRNSRQRYKLLEDGVKNLASDLNGDILKEYPTDNQALQNERLFLYYLQNGRDMYTGEALDIDNLSQYDIDHIVPQAFIKDDSIDNRVLVSSAKNRGKSDDVPSIDIVKARKAFWKKLLDAKLISQRKYDNLTKAERGGLTPDDKAGFIQRQLVETRQITKHVARILDERFNNKVDDNNKPIRKVKIVTLKSNLVSNFRKEFGFYKIREVNNYHHAHDAYLNAVVAKAILTKYPQLEPEFVYGDYPKYNSYKTRKSATEKLFFYSNIMNFFKTKVTLADETVVVKDDIEVNNETGEIAWDKKKHFATVRKVLSYPQVNIVKKTEVQTGGFSKESILAHSNSDKLIPRKTKDIYLDPKKYGGFDSPIVAYSVLVLADIKKGKAQKLKTVKELIGITIMERERFEKNPSAFLESKGYLNIRTDKLIILPKYSLFELENGRRRLLASAGELQKGNELALPTQYMKFLYLASRYNESKGKPEEIEKKQEFVNQHVSYFDDILQLINDFSKRVILADANLEKINKLYSDNKDNTPVDELAKNIINLFTFTSLGAPAAFKFFDKSVDRKRYTSTKEVLDSTLIHQSITGLYETRIDLGKLGED

SEQ ID NO: 317 - protein, 1370 aa, Streptococcus agalactiae
MNKPYSIGLDIGTNSVGWSIITDDYKVPAKKMRVLGNTDKEYIKKNLIGALLFDGGNTAADRRLKRTARRRYTRRRNRILYLQEIFAEEMSKVDDSFFHRLEDSFLVEEDKRGSKYPIFATMQEEKYYHEKFPTIYHLRKELADKKEKADLRLIYLALAHIIKFRGHFLIEDDRFDVRNTDIQKQYQAFLEIFDTTFENNDLLSQNVDVEAILTDKISKSAKKDRILARYPNQKSTGIFAEFLKLIVGNQADFKKHFNLEDKTPLQFAKDSYDEDLENLLGQIGDEFADLFSAAKKLYDSVLLSGILTVTDLSTKAPLSASMIQHYDEHREDLKQLKQFVKASLPEKYQEIFADSSKDGYAGYIEGKTNQEAFYKYLSKLLTKQEGSEYLLEKIKNEDFLRKQRTFDNGSIPHQVHLTELRAIIRRQSEYYPFLKENLDRIEKILTFRIPYYVGPLAREKSDFAWMTRKTDDSIRPWNFEDLVDKEKSAEAFIHRMTNNDLYLPEEKVLPKHSLIYEKFTVYNELTKVRFLAEGFKDFQFLNRKQKETIFNSLFKEKRKVTEKDIISFLNKVDGYEGIAIKGIEKQFNASLSTYHDLKKILGKDFLDNTDNELILEDIVQTLTLFEDREMIRKRLDIYKDFFTESQLKKLYRRHYTGWGRLSAKLINGIRNKENQKTILDYLIDDGSANRNFMQLIKDAGLSFKPIIDKARTGSHSDNLKEVVGELAGSPAIKKGILQSLKIVDELVKVMGYEPEQIVVEMARENQTTAKGLSRSRQRLTTLRESLANLKSNILEEKKPKYVKDQVENHHLSDDRLFLYYLQNGKDMYTDDELDIDNLSQYDIDHIIPQAFIKDDSIDNRVLVSSAKNRGKSDDVPSVEIVKDCKVFWKKLLDAKLMSQRKYDNLTKAERGGLTSDDKARFIQRQLVETRQITKHVARILDERFNNELDSKGRRIRKVKIVTLKSNLVSNFRKEFGFYKIREVNNYHHAHDAYLNAVVAKAILTKYPQLEPEFVYGDYPKYNSYKTRKSATEKLFFYSNIMNFFKTKVTLADGTVVVKDDIEVNNDTGEIVWDKKKHFATVRKVLSYPQVNIVKKTEIQTGGFSKESILAHGNSDKLIPRKTKDIYLDPKKYGGFDSPIVAYSVLVVADIKKGKAQKLKTVTELLGITIMERSRFEKNPSAFLESKGYLNIRDDKLMILPKYSLFELENGRRRLLASAGELQKGNELALPTQFMKFLYLASRYNELKGKPEEIEQKQEFVVQHVSYFDDILQIINDFSNRVILADANLEKINKLYQDNKENIPVDELANNIINLFTFTSLGAPAAFKFFDKIVDRKRYTSTKEVLNSTLIHQSITGLYETRIDLGKLGED

SEQ ID NO: 318 - protein, 1370 aa, Streptococcus agalactiae
MNKPYSIGLDIGTNSVGWSIITDDYKVPAKKMRVLGNTDKEYIKKNLIGALLFDGGNTAADRRLKRTARRRYTRRRNRILYLQEIFAEEMSKVDDSFFHRLEDSFLVEEDKRGSKYPIFATMQEEKYYHEKFPTIYHLRKELADKKEKADLRLIYLALAHIIKFRGHFLIEDDRFDVRNTDIQKQYQAFLEIFDTTFENNDLLSQNVDVEAILTDKISKSAKKDRILARYPNQKSTGIFAEFLKLIVGNQADFKKHFNLEDKTPLQFAKDSYDEDLENLLGQIGDEFADLFSAAKKLYDSVLLSGILTVTDLSTKAPLSASMIQRYDEHREDLKQLKQFVKASLPEKYQEIFADSSKDGYAGYIEGKTNQEAFYKYLSKLLTKQEGSEYLLEKIKNEDFLRKQRTFDNGSIPHQVHLTELRAIIRRQSEYYPFLKENLDRIEKILTFRIPYYVGPLAREKSDFAWMTRKTDDSIRPWNFEDLVDKEKSAEAFIHRMTNNDLYLPEEKVLPKHSLIYEKFTVYNELTKVRFLAEGFKDFQFLNRKQKETIFNSLFKEKRKVTEKDIISFLNKVDGYEGIAIKGIEKQFNASLSTYHDLKKILGKDFLDNTDNELILEDIVQTLTLFEDREMIRKRLDIYKDFFTESQLKKLYRRHYTGWERLSAKLINGIRNKENQKTILDYLIDDGSANRNFMQLIKDAGLSFKPIIDKARTGSHLDNLKEVVGELAGSPAIKKGILQSLKIVDELVKVMGYEPEQIVVEMARENQTTAKGLSRSRQRLTTLRESLANLKSNILEEKKPKYVKDQVENHHLSDDRLFLYYLQNGKDMYTDDELDIDNLSQYDIDHIIPQAFIKDDSIDNRVLVSSAKNRGKSDDVPSLEIVKDCKVFWKKLLDAKLMSQRKYDNLTKAERGGLTSDDKARFIQRQLVETRQITKHVARILDERFNNELDSKGRRIRKVKIVTLKSNLVSNFRKEFGFYKIREVNNYHHAHDAYLNAVVAKAILTKYPQLEPEFVYGDYPKYNSYKTRKSATEKLFFYSNIMNFFKTKVTLADGTVVVKDDIEVNNDTGEIVWDKKKHFATVRKVLSYPQVNIVKKTEVQTGGFSKESILAHGNSDKLIPRKTKDIYLDPKKYGGFDSPIVAYSVLVVADIKKGKAQKLKTVTELLGITIMERSRFEKNPSAFLESKGYLNIRTDKLIILPKYSLFELENGRRRLLASAGELQKGNELALPTQYMKFLYLASRYNELKGKPEEIEQKQEFVVQHVSYFDDILQIINDFSNRVILADANLEKINKLYQDNKENIPVDELANNIINLFTFTSLGAPAAFKFFDKIVDRKRYTSTKEVLNSTLIHQSITGLYETRIDLGKLGEG

SEQ ID NO: 319 - protein, 1370 aa, Streptococcus agalactiae
MNKPYSIGLDIGTNSVGWSIITDDYKVPAKKMRVLGNTDKEYIKKNLIGALLFDGGNTAADRRLKRTARRRYTRRRNRILYLQEIFAEEMSKVDDSFFHRLEDSFLVEEDKRGSKYPIFATMQEEKYYHEKFPTIYHLRKELADKKEKADLRLIYLALAHIIKFRGHFLIEDDRFDVRNTDIQKQYQAFLEIFDTTFENNDLLSQNVDVEAILTDKISKSAKKDRILARYPNQKSTGIFAEFLKLIVGNQADFKKHFNLEDKTPLQFAKDSYDEDLENLLGQIGDEFADLFSAAKKLYDSVLLSGILTVTDLSTKAPLSASMIQRYDEHREDLKQLKQFVKASLPEKYQEIFADSSKDGYAGYIEGKTNQEAFYKYLSKLLTKQEGSEYLLEKIKNEDFLRKQRTFDNGSIPHQVHLTELRAIIRRQSEYYPFLKENLDRIEKILTFRIPYYVGPLAREKSDFAWMTRKTDDSIRPWNFEDLVDKEKSAEAFIHRMTNNDLYLPEEKVLPKHSLIYEKFTVYNELTKVRFLAEGFKDFQFLNRKQKETIFNSLFKEKRKVTEKDIISFLNKVDGYEGIAIKGIEKQFNASLSTYHDLKKILGKDFLDNTDNELILEDIVQTLTLFEDREMIRKRLDIYKDFFTESQLKKLYRRHYTGWGRLSAKLINGIRNKENQKTILDYLIDDGSANRNFMQLIKDAGLSFKPIIDKARTGSHLDNLKEVVGELAGSPAIKKGILQSLKIVDELVKVMGYEPEQIVVEMARENQTTAKGLSRSRQRLTTLRESLANLKSNILEEKKPKYVKDQVENHHLSDDRLFLYYLQNGKDMYTDDELDIDNLSQYDIDHIIPQAFIKDDSIDNRVLVSSAKNRGKSDDVPSLEIVKDCKVFWKKLLDAKLMSQRKYDNLTKAERGGLTSDDKARFIQRQLVETRQITKHVARILDERFNNELDSKGRRIRKVKIVTLKSNLVSNFRKEFGFYKIREVNNYHHAHDAYLNAVVAKAILTKYPQLEPEFVYGDYPKYNSYKTRKSATEKLFFYSNIMNFFKTKVTLADGTVVVKDDIEVNNDTGEIVWDKKKHFATVRKVLSYPQVNIVKKTEVQTGGFSKESILAHGNSDKLIPRKTKDIYLDPKKYGGFDSPIVAYSVLVVADIKKGKAQKLKTVTELLGITIMERSRFEKNPSAFLESKGYLNIRTDKLIILPKYSLFELENGRRRLLASAGELQKGNELALPTQYMKFLYLASRYNELKGKPEEIEQKQEFVVQHVSYFDDILQIINDFSNRVILADANLEKINKLYQDNKENIPVDELANNIINLFTFTSLGAPAAFKFFDKIVDRKRYTSTKEVLNSTLIHQSITGLYETRIDLGKLGEG

SEQ ID NO: 320 - protein, 1370 aa, Streptococcus agalactiae
MNKPYSIGLDIGTNSVGWSIITDDYKVPAKKMRVLGNTDKEYIKKNLIGALLFDGGNTAADRRLKRTARRRYTRRRNRILYLQEIFAEEMSKVDDSFFHRLEDSFLVEEDKRGSKYPIFATMQEEKYYHEKFPTIYHLRKELADKKEKADLRLIYLALAHIIKFRGHFLIEDDRFDVRNTDIQKQYQAFLEIFDTTFENNDLLSQNVDVEAILTDKISKSAKKDRILARYPNQKSTGIFAEFLKLIVGNQADFKKHFNLEDKTPLQFAKDSYDEDLENLLGQIGDEFADLFSAAKKLYDSVLLSGILTVTDLSTKAPLSASMIQRYDEHREDLKQLKQFVKASLPEKYQEIFADSSKDGYAGYIEGKTNQEAFYKYLSKLLTKQEGSEYLLEKIKNEDFLRKQRTFDNGSIPHQVHLTELRAIIRRQSEYYPFLKENLDRIEKILTFRIPYYVGPLAREKSDFAWMTRKTDDSIRPWNFEDLVDKEKSAEAFIHRMTNNDLYLPEEKVLPKHSLIYEKFTVYNELTKVRFLAEGFKDFQFLNRKQKETIFNSLFKEKRKVTEKDIISFLNKVDGYEGIAIKGIEKQFNASLSTYHDLKKILGKDFLDNTDNELILEDIVQTLTLFEDREMIRKRLDIYKDFFTESQLKKLYRRHYTGWGRLSAKLINGIRNKENQKTILDYLIDDGSANRNFMQLIKDAGLSFKPIIDKARTGSHSDNLKEVVGELAGSPAIKKGILQSLKIVDELVKVMGYEPEQIVVEMARENQTTAKGLSRLRQRLTTLRESLANLKSNILEEKKPKYVKDQVENHHLSDDRLFLYYLQNGKDMYTDDELDIDNLSQYDIDHIIPQAFIKDDSIDNRVLVSSAKNRGKSDDVPSVEIVKDCKVFWKKLLDAKLMSQRKYDNLTKAERGGLTSDDKARFIQRQLVETRQITKHVARILDERFNNELDSKGRRIRKVKIVTLKSNLVSNFRKEFGFYKIREVNNYHHAHDAYLNAVVAKAILTKYPQLEPEFVYGDYPKYNSYKTRKSATEKLFFYSNIMNFFKTKVTLADGTVVVKDDIEVNNDTGEIVWDKKKHFATVRKVLSYPQVNIVKKTEIQTGGFSKESILAHGNSDKLIPRKTKDIYLDPKKYGGFDSPIVAYSVLVVADIKKGKAQKLKTVTELLGITIMERSRFEKNPSAFLESKGYLNIRDDKLMILPKYSLFELENGRRRLLASADELQKGNELALPTQFMKFLYLASRYNELKGKPEEIEQKQEFVVQHVSYFDDILQIINDFSNRVILADANLEKINKLYQDNKENIPVDELANNIINLFTFTSLGAPAAFKFFDKIVDRKRYTSTKEVLNSTLIHQSITGLYETRIDLGKLGED

SEQ ID NO: 321 - protein, 1370 aa, Streptococcus agalactiae
MNKPYSIGLDIGTNSVGWSIITDDYKVPAKKMRVLGNTDKEYIKKNLIGALLFDGGNTAADRRLKRTARRRYTRRRNRILYLQEIFAEEMSKVDDSFFHRLEDSFLVEEDKRGSKYPIFATMQEEKYYHEKFPTIYHLRKELADKKEKADLRLIYLALAHIIKFRGHFLIEDDRFDVRNTDIQKQYQAFLEIFDTTFENNDLLSQNVDVEAILTDKISKSAKKDRILARYPNQKSTGIFAEFLKLIVGNQADFKKHFNLEDKTPLQFAKDSYDEDLENLLGQIGDEFADLFSAAKKLYDSVLLSGILTVTDLSTKAPLSASMIQRYDEHREDLKQLKQFVKASLPEKYQEIFADSSKDGYAGYIEGKTNQEAFYKYLSKLLTKQEGSEYLLEKIKNEDFLRKQRTFDNGSIPHQVHLTELRAIIRRQSEYYPFLKENLDRIEKILTFRIPYYVGPLAREKSDFAWMTRKTDDSIRPWNFEDLVDKEKSAEAFIHRMTNNDLYLPEEKVLPKHSLIYEKFTVYNELTKVRFLAEGFKDFQFLNRKQKETIFNSLFKEKRKVTEKDIISFLNKVDGYEGIAIKGIEKQFNASLSTYHDLKKILGKDFLDNTDNELILEDIVQTLTLFEDREMIRKRLDIYKDFFTESQLKKLYRRHYTGWGRLSAKLINGIRNKENQKTILDYLIDDGSANRNFMQLIKDAGLSFKPIIDKARTGSHSDNLKEVVGELAGSPAIKKGILQSLKIVDELVKVMGYEPEQIVVEMARENQTTAKGLSRSRQRLTTLRESLANLKSNILEEKKPKYVKDQVENHHLSDDRLFLYYLQNGKDMYTDDELDIDNLSQYDIDHIIPQAFIKDDSIDNRVLVSSAKNRGKSDDVPSVEIVKDCKVFWKKLLDAKLMSQRKYDNLTKAERGGLTSDDKARFIQRQLVETRQITKHVARILDERFNNELDSKGRRIRKVKIVTLKSNLVSNFRKEFGFYKIREVNNYHHAHDAYLNAVVAKAILTKYPQLEPEFVYGDYPKYNSYKTRKSATEKLFFYSNIMNFFKTKVTLADGTVVVKDDIEVNNDTGEIVWDKKKHFATVRKVLSYPQVNIVKKTEIQTGGFSKESILAHGNSDKLIPRKTKDIYLDPKKYGGFDSPIVAYSVLVVADIKKGKAQKLKTVTELLGITIMERSRFEKNPSAFLESKGYLNIRDDKLMILPKYSLFELENGRRRLLASAGELQKGNELALPTQFMKFLYLASRYNELKGKPEEIEQKQEFVVQHVSYFDDILQIINDFSNRVILADANLEKINKLYQDNKENIPVDELANNIINLFTFTSLGAPAAFKFFDKIVDRKRYTSTKEVLNSTLIHQSITGLYETRIDLGKLGED

SEQ ID NO: 322 - protein, 1370 aa, Streptococcus agalactiae
MNKPYSIGLDIGTNSVGWSIITDDYKVPAKKMRVLGNTDKEYIKKNLIGALLFDGGNTAADRRLKRTARRRYTRRRNRILYLQEIFAEEMSKVDDSFFHRLEDSFLVEEDKRGSKYPIFATMQEEKYYHEKFPTIYHLRKELADKKEKADLRLIYLALAHIIKFRGHFLIEDDRFDVRNTDIQKQYQAFLEIFDTTFENNDLLSQNVDVEAILTDKISKSAKKDRILARYPNQKSTGIFAEFLKLIVGNQADFKKHFNLEDKTPLQFAKDSYDEDLENLLGQIGDEFADLFSAAKKLYDSVLLSGILTVTDLSTKAPLSASMIQRYDEHREDLKQLKQFVKASLPEKYQEIFADSSKDGYAGYIEGKTNQEAFYKYLSKLLTKQEGSEYLLEKIKNEDFLRKQRTFDNGSIPHQVHLTELRAIIRRQSEYYPFLKENLDRIEKILTFRIPYYVGPLAREKSDFAWMTRKTDDSIRPWNFEDLVDKEKSAEAFIHRMTNNDLYLPEEKVLPKHSLIYEKFTVYNELTKVRFLAEGFKDFQFLNRKQKETIFNSLFKEKRKVTEKDIISFLNKVDGYEGIAIKGIEKQFNASLSTYHDLKKILGKDFLDNTDNELILEDIVQTLTLFEDREMIRKRLDIYKDFFTESQLKKLYRRHYTGWGRLSAKLINGIRNKENQKTILDYLIDDGSANRNFMQLIKDAGLSFKPIIDKARTGSHSDNLKEVVGELAGSPAIKKGILQSLKIVDELVKVMGYEPEQIVVEMARENQTTAKGLSRSRQRLTTLRESLANLKSNILEEKKPKYVKDQVENHHLSDDRLFLYYLQNGKDMYTDDELDIDNLSQYDIDHIIPQAFIKDDSIDNRVLVSSAKNRGKSDDVPSVEIVKDCKVFWKKLLDAKLMSQRKYDNLTKAERGGLTSDDKARFIQRQLVETRQITKHVARILDERFNNELDSKGRRIRKVKIVTLKSNLVSNFRKEFGFYKIREVNNYHHAHDAYLNAVVAKAILTKYPQLEPEFVYGDYPKYNSYKTRKSATEKLFFYSNIMNFFKTKVTLADGTVVVKDDIEVNNDTGEIVWDKKKHFATVRKVLSYPQVNIVKKTEIQTGGFSKESILAHGNSDKLIPRKTKDIYLDPKKYGGFDSPKVAYSVLVVADIKKGKAQKLKTVTELLGITIMERSRFEKNPSAFLESKGYLNIRDDKLMILPKYSLFELENGRRRLLASAGELQKGNELALPTQFMKFLYLASRYNELKGKPEEIEQKQEFVVQHVSYFDDILQIINDFSNRVILADANLEKINKLYQDNKENIPVDELANNIINLFTFTSLGAPAAFKFFDKIVDRKRYTSTKEVLNSTLIHKSITGLYETRIDLGKLGED

SEQ ID NO: 323 - protein, 1370 aa, Streptococcus agalactiae
MNKPYSIGLDIGTNSVGWSIITDDYKVPAKKMRVLGNTDKEYIKKNLIGALLFDGGNTAADRRLKRTARRRYTRRRNRILYLQEIFAEEMSKVDDSFFHRLEDSFLVEEDKRGSKYPIFATMQEEKYYHEKFPTIYHLRKELADKKEKADLRLIYLALAHIIKFRGHFLIEDDRFDVRNTDIQKQYQAFLEIFDTTFENNDLLSQNVDVEAILTDKISKSAKKDRILARYPNQKSTGIFAEFLKLIVGNQADFKKHFNLEDKTPLQFAKDSYDEDLENLLGQIGDEFADLFSAAKKLYDSVLLSGILTVTDLSTKAPLSASMIQRYDEHREDLKQLKQFVKASLPEKYQEIFADSSKDGYAGYIEGKTNQEAFYKYLSKLLTKQEGSEYLLEKIKNEDFLRKQRTFDNGSIPHQVHLTELRAIIRRQSEYYPLLKENLDRIEKILTFRIPYYVGPLAREKSDFAWMTRKTDDSIRPWNFEDLVDKEKSAEAFIHRMTNNDLYLPEEKVLPKHSLIYEKFTVYNELTKVRFLAEGFKDFQFLNRKQKETIFNSLFKEKRKVTEKDIISFLNKVDGYEGIAIKGIEKQFNASLSTYHDLKKILGKDFLDNTDNELILEDIVQTLTLFEDREMIRKRLDIYKDFFTESQLKKLYRRHYTGWGRLSAKLINGIRNKENQKTILDYLIDDGSANRNFMQLIKDAGLSFKPIIDKARTGSHSDNLKEVVGELAGSPAIKKGILQSLKIVDELVKVMGYEPEQIVVEMARENQTTAKGLSRSRQRLTTLRESLANLKSNILEEKKPKYVKDQVENHHLSDDRLFLYYLQNGKDMYTDDELDIDNLSQYDIDHIIPQAFIKDDSIDNRVLVSSAKNRGKSDDVPSVEIVKDCKVFWKKLLDAKLMSQRKYDNLTKAERGGLTSDDKARFIQRQLVETRQITKHVARILDERFNNELDSKGRRIRKVKIVTLKSNLVSNFRKEFGFYKIREVNNYHHAHDAYLNAVVAKAILTKYPQLEPEFVYGDYPKYNSYKTRKSATEKLFFYSNIMNFFKTKVTLADGTVVVKDDIEVNNDTGEIVWDKKKHFATVRKVLSYPQVNIVKKTEIQTGGFSKESILAHGNSDKLIPRKTKDIYLDPKKYGGFDSPIVAYSVLVVADIKKGKAQKLKTVTELLGITIMERSRFEKNPSAFLESKGYLDIRDDKLMILPKYSLFELENGRRRLLASAGELQKGNELALPTQFMKFLYLASRYNELKGKPEEIEQKQEFVVQHVSYFDDILQIINDFSNRVILADANLEKINKLYQDNKENIPVDELANNIINLFTFTSLGAPAAFKFFDKIVDRKRYTSTKEVLNSTLIHQSITGLYETRIDLGKLGED

SEQ ID NO: 324 - protein, 1370 aa, Streptococcus agalactiae
MNKPYSIGLDIGTNSVGWSIITDDYKVPAKKMRVLGNTDKEYIKKNLIGALLFDGGNTAADRRLKRTARRRYTRRRNRILYLQEIFAEEMSKVDDSFFHRLEDSFLVEEDKRGSKYPIFATMQEEKYYHEKFPTIYHLRKELADKKEKADLRLIYLALAHIIKFRGHFLIEDDRFDVRNTDIQKQYQAFLEIFDTTFENNDLLSQNVDVEAILTDKISKSAKKDRILARYPNQKSTGIFAEFLKLIVGNQADFKKHFNLEDKTPLQFAKDSYDEDLENLLGQIGDEFADLFSAAKKLYDSVLLSGILTVTDLSTKAPLSASMIQRYDEHREDLKQLKQFVKASLPEKYQEIFADSSKDGYAGYIEGKTNQEAFYKYLSKLLTKQEGSEYLLEKIKNEDFLRKQRTFDNGSIPHQVHLTELRAIIRRQSEYYPFLKENLDRIEKILTFRIPYYVGPLAREKSDFAWMTRKTDDSIRPWNFEDLVDKEKSAEAFIHRMTNNDLYLPEEKVLPKHSLIYEKFTVYNELTKVRFLAEGFKDFQFLNRKQKETIFNSLFKEKRKVTEKDIISFLNKVDGYEGIAIKGIEKQFNASLSTYHDLKKILGKDFLDNTDNELILEDIVQTLTLFEDREMIRKRLDIYKDFFTESQLKKLYRRHYTGWGRLSAKLINGIRNKENQKTILDYLIDDGSANRNFMQLIKDAGLSFKPIIDKARTGSHSDNLKEVVGELAGSPAIKKGILQSLKIVDELVKVMGYEPEQIVVEMARENQTTAKGLSRLRQRLTTLRESLANLKSNILEEKKPKYVKDQVENHHLSDDRLFLYYLQNGKDMYTDDELDIDNLSQYDIDLIIPQAFIKDDSIDNRVLVSSAKNRGKSDDVPSVEIVKDCKVFWKKLLDAKLMSQRKYDNLTKAERGGLTSDDKARFIQRQLVETRQITKHVARILDERFNNELDSKGRRIRKVKIVTLKSNLVSNFRKEFGFYKIREVNNYHHAHDAYLNAVVAKAILTKYPQLEPEFVYGDYPKYNSYKTRKSATEKLFFYSNIMNFFKTKVTLADGTVVVKDDIEVNNDTGEIVWDKKKHFATVRKVLSYPQVNIVKKTEIQTGGFSKESILAHGNSDKLIPRKTKDIYLDPKKYGGFDSPIVAYSVLVVADIKKGKAQKLKTVTELLGITIMERSRFEKNPSAFLESKGYLNIRDDKLMILPKYSLFELENGRRRLLASADELQKGNELALPTQFMKFLYLASRYNELKGKPEEIEQKQEFVVQHVSYFDDILQIINDFSNRVILADANLEKINKLYQDNKENIPVDELANNIINLFTFTSLGAPAAFKFFDKIVDRKRYTSTKEVLNSTLIHQSITGLYETRIDLGKLGED

SEQ ID NO: 325 - protein, 1370 aa, Streptococcus agalactiae
MNKPYSIGLDIGTNSVGWSIITDDYKVPAKKMRVLGNTDKEYIKKNLIGALLFDGGNTAADRRLKRTARRRYTRRRNRILYLQEIFAEEMSKVDDSFFHRLEDSFLVEEDKRGSKYPIFATMQEEKYYHEKFPTIYHLRKELADKKEKADLRLIYLALAHIIKFRGHFLIEDDSFDVRNTDIQKQYQAFLEIFDTTFENNDLLSQNVDVEAILTDKISKSAKKDRILARYPNQKSTGIFAEFLKLIVGNQADFKKHFNLEDKTPLQFAKDSYDEDLENLLGQIGDEFADLFSAAKKLYDSVLLSGILTVTDLSTKAPLSASMIQRYDEHREDLKQLKQFVKASLPEKYQEIFADSSKDGYAGYIEGKTNQEAFYKYLSKLLTKQEGSEYLLEKIKNEDFLRKQRTFDNGSIPHQVHLTELRAIIRRQSEYYPFLKENLDRIEKILTFRIPYYVGPLAREKSDFAWMTRKTDDSIRPWNFEDLVDKEKSAEAFIHRMTNNDLYLPEEKVLPKHSLIYEKFTVYNELTKVRFLAEGFKDFQFLNRKQKETIFNSLFKEKRKVTEKDIISFLNKVDGYEGIAIKGIEKQFNASLSTYHDLKKILGKDFLDNTDNELILEDIVQTLTLFEDREMIRKRLDIYKDFFTESQLKKLYRRHYTGWGRLSAKLINGIRNKENQKTILDYLIDDGSANRNFMQLIKDAGLSFKPIIDKARTGSHSDNLKEVVGELAGSPAIKKGILQSLKIVDELVKVMGYEPEQIVVEMARENQTTAKGLSRSRQRLTTLRESLANLKSNILEEKKPKYVKDQVENHHLSDDRLFLYYLQNGKDMYTDDELDIDNLSQYDIDHIIPQAFIKDDSIDNRVLVSSAKNRGKSDDVPSVEIVKDCKVFWKKLLDAKLMSQRKYDNLTKAERGGLTSDDKARFIQRQLVETRQITKHVARILDERFNNELDSKGRRIRKVKIVTLKSNLVSNFRKEFGFYKIREVNNYHHAHDAYLNAVVAKAILTKYPQLEPEFVYGDYPKYNSYKTRKSATEKLFFYSNIMNFFKTKVTLADGTVVVKDDIEVNNDTGEIVWDKKKHFATVRKVLSYPQVNIVKKTEIQTGGFSKESILAHGNSDKLIPRKTKDIYLDPKKYGGFDSPIVAYSVLVVADIKKGKAQKLKTVTELLGITIMERSRFEKNPSAFLESKGYLNIRDDKLMILPKYSLFELENGRRRLLASAGELQKGNELALPTQFMKFLYLASRYNELKGKPEEIEQKQEFVVQHVSYFDDILQIINDFSNRVILADANLEKINKLYQDNKENIPVDELANNIINLFTFTSLGAPAAFKFFDKIVDRKRYTSTKEVLNSTLIHKSITGLYETRIDLGKLGED

SEQ ID NO: 326 - protein, 1370 aa, Streptococcus agalactiae
  misc_feature (117)..(117): Xaa can be any naturally occurring amino acid
MNKPYSIGLDIGTNSVGWSIITDDYKVPAKKMRVLGNTDKEYIKKNLIGALLFDGGNTAADRRLKRTARRRYTRRRNRILYLQEIFAEEMSKVDDSFFHRLEDSFLVEEDKRGSKYXIFATLQEEKDYHEKFSTIYHLRKELADKKEKADLRLIYIALAHIIKFRGHFLIEDDSFDVRNTDISKQYQDFLEIFNTTFENNDLLSQNVDVEAILTDKISKSAKKDRILAQYPNQKSTGIFAEFLKLIVGNQADFKKYFNLEDKTPLQFAKDSYDEDLENLLGQIGDEFADLFSAAKKLYDSVLLSGILTVIDLSTKAPLSASMIQRYDEHREDLKQLKQFVKASLPEKYQEIFADSSKDGYAGYIEGKTNQEAFYKYLSKLLTKQEDSENFLEKIKNEDFLRKQRTFDNGSIPHQVHLTELKAIIRRQSEYYPFLKENQDRIEKILTFRIPYYIGPLAREKSDFAWMTRKTDDSIRPWNFEDLVDKEKSAEAFIHRMTNNDFYLPEEKVLPKHSLIYEKFTVYNELTKVRYKNEQGETYFFDSNIKQEIFDGVFKEHRKVSKKKLLDFLAKEYEEFRIVDVIGLDKENKAFNASLGTYHDLEKILDKDFLDNPDNESILEDIVQTLTLFEDREMIKKRLENYKDLFTESQLKKLYRRHYTGWGRLSAKLINGIRDKESQKTILDYLIDDGRSNRNFMQLINDDGLSFKSIISKAQAGSHSDNLKEVVGELAGSPAIKKGILQSLKIVDELVKVMGYEPEQIVVEMARENQTTNQGRRNSRQRYKLLDDGVKNLASDLNGNILKEYPTDNQALQNERLFLYYLQNGRDMYTGEALDIDNLSQYDIDHIIPQAFIKDDSIDNRVLVSSAKNRGKSDDVPSLEIVKDCKVFWKKLLDAKLMSQRKYDNLTKAERGGLTSDDKARFIQRQLVETRQITKHVARILDERFNNELDSKGRRIRKVKIVTLKSNLVSNFRKEFGFYKIREVNNYHHAHDAYLNAVVAKAILTKYPQLEPEFVYGDYPKYNSYKTRKSATEKLFFYSNIMNFFKTKVTLADGTVVVKDDIEVNNDTGEIVWDKKKHFATVRKVLSYPQNNIVKKTEIQTGGFSKESILAHGNSDKLIPRKTKDIYLDPKKYGGFDSPIVAYSVLVVADIKKGKAQKLKTVTELLGITIMERSRFEKNPSAFLESKGYLNIRADKLIILPKYSLFELENGRRRLLASAGELQKGNELALPTQFMKFLYLASRYNESKGKPEEIEKKQEFVNQHVSYFDDILQLINDFSKRVILADANLEKINKLYQDNKENISVDELANNIINLFTFTSLGAPAAFKFFDKIVDRKRYTSTKEVLNSTLIHQSITGLYETRIDLGKLGED

SEQ ID NO: 327 - protein, 1370 aa, Streptococcus agalactiae
MNKPYSIGLDIGTNSVGWSIITDDYKVPAKKMRVLGNTDKEYIKKNLIGALLFDGGNTAADRRLKRTSRRRYTRRRNRILYLQEIFAEEMSKVDDSFFHRLEDSFLVEEDKRGSKYPIFATLQEEKDYHEKFSTIYHLRKELADKKEKADLRLIYIALAHIIKFRGHFLIEDDSFDVRNTDISKQYQDFLEIFNTTFENNDLLSQNVDVEAILTDKISKSAKKDRILAQYPNQKSTGIFAEFLKLIVGNQADFKKYFNLEDKTPLQFAKDSYDEDLENLLGQIGDEFADLFSAAKKLYDSVLLSGILTVIDLSTKAPLSASMIQRYDEHREDLKQLKQFVKASLPEKYQEIFADSSKDGYAGYIEGKTNQEAFYKYLSKLLTKQEDSENFLEKIKNEDFLRKQRTFDNGSIPHQVHLTELKAIIRRQSEYYPFLKENQDRIEKILTFRIPYYIGPLAREKSDFAWMTRKTDDSIRPWNFEDLVDKEKSAEAFIHRMTNNDFYLPEEKVLPKHSLIYEKFTVYNELTKVRYKNEQGETYFFDSNIKQEIFDGVFKEHRKVSKKKLLDFLAKEYEEFRIVDVIGLDKENKAFNASLGTYHDLEKILDKDFLDNPDNESILEDIVQTLTLFEDREMIKKRLENYKDLFTESQLKKLYRRHYTGWGRLSAKLINGIRDKESQKTILDYLIDDGRSNRNFMQLINDDGLSFKSIISKAQAGSHSDNLKEVVGELAGSPAIKKGILQSLKIVDELVKVMGYEPEQIVVEMARENQTTNQGRRNSRQRYKLLDDGVKNLASDLNGNILKEYPTDNQALQNERLFLYYLQNGRDMYTGEALDIDNLSQYDIDHIIPQAFIKDDSIDNRVLVSSAKNRGKSDDVPSLEIVKDCKVFWKKLLDAKLMSQRKYDNLTKAERGGLTSDDKARFIQRQLVETRQITKHVARILDERFNNELDSKGRRIRKVKIVTLKSNLVSNFRKEFGFYKIREVNNYHHAHDAYLNAVVAKAILTKYPQLEPEFVYGDYPKYNSYKTRKSATEKLFFYSNIMNFFKTKVTLADGTVVVKDDIEVNNDTGEIVWDKKKHFATVRKVLSYPQNNIVKKTEIQTGGFSKESILAHGNSDKLIPRKTKDIYLDPKKYGGFDSPIVAYSVLVVADIKKGKAQKLKTVTELLGITIMERSRFEKNPSAFLESKGYLNIRADKLIILPKYSLFELENGRRRLLASAGELQKGNELALPTQFMKFLYLASRYNESKGKPEEIEKKQEFVNQHVSYFDDILQLINDFSKRVILADANLEKINKLYQDNKENISVDELANNIINLFTFTSLGAPAAFKFFDKIVDRKRYTSTKEVLNSTLIHQSITGLYETRIDLGKLGED

SEQ ID NO: 328 - protein, 1370 aa, Streptococcus agalactiae
MNKPYSIGLDIGTNSVGWSIITDDYKVPAKKMRVLGNTDKEYIKKNLIGALLFDGGNTASDRRLKRTARRRYTRRRNRILYLQEIFAEEMSKVDDSFFHRLEDSFLVEDDKRGSKYPIFATMQEEKDYHEKFPTIYHLRKELADKKEKADLRLFYLALAHIIKFRGHFLIEDDSFDVRNTDIQRQYQAFLEIFDTTFENNHLLSQNIDIEGILTDKISKSAKKDRILAQYPNQKSTGIFAEFLKLIVGNQADFKKHFNLEDKTPLQFAKDSYDEDLENLLGQIGDEFADLFSVAKKLYDSVLLSGILTVTDLSTKAPLSASMIQRYDEHREDLKQLKQFVKASLPEKYQEIFTDSSKDGYAGYIEGKTNQGAFYKYLSKLLTKQEGSEYFLEKIKNEDFLRKQRTFDNGSIPHQVHLTELKAIIRRQSEYYPFLKENLDRIEKILTFRIPYYVGPLAREKSDFAWMTRKTDDSIRPWNFEELVDKEASAEAFIHRMTNNDLYLPEEKVLPKHSLIYEKFTVYNELTKVRYKNEQGETYFFDSNIKQEIFDGVFKEHRKVSKKKLLDFLAKEYEEFRIVDVIGLDKENKAFNASLGTYHDLKKILDKDFLDNPDNESILEDIVQTLTLFEDREMIKKRLENYKDLFTESQLKKLYRRHYTGWGRLSAKLINGIRDKESQKTILDYLIDDGKSNRNFMQLIHDDGLSFKSIISKAQAGSHSDNLKEVVGELAGSPAIKKGILQSLKIVDELVKVMGYEPEQIVVEMARENQTTNQGRRNSRQRYKLLDDGVKNLASDLNGNILKEYPTDNQALQNERLFLYYLQNGRDMYTGKALDIDNLSQYDIDHIIPQAFIKDDSIDNRVLVSSAKNRGKSDDVPSLEIVKDCKVFWKKLLDAKLMSQRKYDNLTKAERGGLTSDDKARFIQRQLVETRQITKHVARILDERFNNELDSKGRRIRKVKIVTLKSNLVSNFRKEFGFYKIREVNNYHHAHDAYLNAVVAKAILTKYPQLEPEFVYGDYPKYNSYKTRKSATEKLFFYSNIMNFFKTKVTLADGTVVVKDDIEVNNDTGEIVWDKKKHFATVRKVLSYPQVNIVKKTEIQTGGFSKESILAHGNSDKLIPRKTKDIYLDPKKYGGFDSPIVAYSVLVVADIKKGKAQKLKTVTELLGITIMERSRFEKNPSAFLESKGYLNIRDDKLMILPKYSLFELENGRRRLLASAGELQKGNELALPTQFMKFLYLASRYNELKGKPEEIEQKQEFVVQHVSYFDDILQIINDFSNRVILADANLEKINKLYQDNKENISVDELANNIINLFTFTSLGAPAAFKFFDKIVDRKRYTSTKEVLNSTLIHQSITGLYETRIDLGKLGED

SEQ ID NO: 329 - protein, 1370 aa, Streptococcus agalactiae
MNKPYSIGLDIGTNSVGWSIITDDYKVPAKKMRVLGNTDKEYIKKNLIGALLFDGGNTASDRRLKRTARRRYTRRRNRILYLQEIFAEEMSKVDDSFFHRLEDSFLVEDDKRGSKYPIFATMQEEKDYHEKFPTIYHLRKELADKKEKADLRLFYLALAHIIKFRGHFLIEDDSFDVRNTDIQRQYQAFLEIFDTTFENNHLLSQNIDVEGILTDKISKSAKKDRILAQYPNQKSTGIFAEFLKLIVGNQADFKKHFNLEDKTPLQFAKDSYDEDLENLLGQIGDEFADLFSVAKKLYDSVLLSGILTVTDLSTKAPLSASMIQRYDEHREDLKQLKQFVKASLPEKYQEIFTDSSKDGYAGYIEGKTNQGAFYKYLSKLLTKQEGSEYFLEKIKNEDFLRKQRTFDNGSIPHQVHLTELKAIIRRQSEYYPFLKENLDRIEKILTFRIPYYVGPLAREKSDFAWMTRKTDDSIRPWNFEELVDKEASAEAFIHRMTNNDLYLPEEKVLPKHSLIYEKFTVYNELTKVRYKNEQGETYFFDSNIKQEIFDGVFKEHRKVSKKKLLDFLAKEYEEFRIVDVIGLDKENKAFNASLGTYHDLKKILDKDFLDNPDNESILEDIVQTLTLFEDREMIKKRLENYKDLFTESQLKKLYRRHYTGWGRLSAKLINGIRDKESQKTILDYLIDDGKSNRNFMQLIHDDGLSFKSIISKAQAGSHSDNLKEVVGELAGSPAIKKGILQSLKIVDELVKVMGYEPEQIVVEMARENQTTNQGRRNSRQRYKLLDDGVKNLASDLNGNILKEYPTDNQALQNERLFLYYLQNGRDMYTGKALDIDNLSQYDIDHIIPQAFIKDDSIDNRVLVSSAKNRGKSDDVPSLEIVKDCKVFWKKLLDAKLMSQRKYDNLTKAERGGLTSDDKARFIQRQLVETRQITKHVARILDERFNNELDSKGRRIRKVKIVTLKSNLVSNFRKEFGFYKIREVNNYHHAHDAYLNAVVAKAILTKYPQLEPEFVYGDYPKYNSYKTRKSATEKLFFYSNIMNFFKTKVTLADGTVVVKDDIEVNNDTGEIVWDKKKHFATVRKVLSYPQVNIVKKTEIQTGGFSKESILAHGNSDKLIPRKTKDIYLDPKKYGGFDSPIVAYSVLVVADIKKGKAQKLKTVTELLGITIMERSRFEKNPSAFLESKGYLNIRDDKLMILPKYSLFELENGRRRLLASAGELQKGNELALPTQFMKFLYLASRYNELKGKPEEIEQKQEFVVQHVSYFDDILQIINDFSNRVILADANLEKINKLYQDNKENISVDELANNIINLFTFTSLGAPAAFKFFDKIVDRKRYTSTKEVLNSTLIHQSITGLYETRIDLGKLGED

SEQ ID NO: 330 - protein, 1370 aa, Streptococcus agalactiae
MNKPYSIGLDIGTNSVGWSIITDDYKVPAKKMRVLGNTDKEYIKKNLIGALLFDGRNTAADRRLKRTARRRYTRRRNRILYLQEIFAEEMSKVDDSFFHRLEDSFLVEEDKRGSKYPIFATLQEEKDYHEKFSTIYHLRKELADKKEKADLRLIYIALAHIIKFRGHFLIEDDSFDVRNTDISKQYQDFLEIFNTTFENNDLLSQNVDVEAILTDKISKSAKKDRILAQYPNQKSTGIFAEFLKLIVGNQADFKKYFNLEDKTPLQFAKDSYDEDLENLLGQIGDEFADLFSAAKKLYDSVLLSGILTVIDLSTKAPLSASMIQRYDEHREDLKQLKQFVKASLPEKYQEIFADSSKDGYAGYIEGKTNQEAFYKYLSKLLTKQEDSENFLEKIKNEDFLRKQRTFDNGSIPHQVHLTELKAIIRRQSEYYPFLKENQDRIEKILTFRIPYYIGPLAREKSDFAWMTRKTDDSIRPWNFEDLVDKEKSAEAFIHRMTNNDFYLPEEKVLPKHSLIYEKFTVYNELTKVRYKNEQGETYFFDSNIKQEIFDGVFKEHRKVSKKKLLDFLAKEYEEFRIVDVIGLDKENKAFNASLGTYHDLEKILDKDFLDNPDNESILEDIVQTLTLFEDREMIKKRLENYKDLFTESQLKKLYRRHYTGWGRLSAKLINGIRDKESQKTILDYLIDDGRSNRNFMQLINDDGLSFKSIISKAQAGSHSDNLKEVVGELAGSPAIKKGILQSLKIVDELVKVMGYEPEQIVVEMARENQTTNQGRRNSRQRYKLLDDGVKNLASDLNGNILKEYPTDNQALQNERLFLYYLQNGRDMYTGEALDIDNLSQYDIDHIIPQAFIKDDSIDNRVLVSSAKNRGKSDDVPSLEIVKDCKVFWKKLLDAKLMSQRKYDNLTKAERGGLTSDDKARFIQRQLVETRQITKHVARILDERFNNELDSKGRRIRKVKIVTLKSNLVSNFRKEFGFYKIREVNNYHHAHDAYLNAVVAKAILTKYPQLEPEFVYGDYPKYNSYKTRKSATEKLFFYSNIMNFFKTKVTLADGTVVVKDDIEVNNDTGEIVWDKKKHFATVRKVLSYPQNNIVKKTEIQTGGFSKESILAHGNSDKLIPRKTKDIYLDPKKYGGFDSPIVAYSVLVVADIKKGKAQKLKTVTELLGITIMERSRFEKNPSAFLESKGYLNIRADKLIILPKYSLFELENGRRRLLASAGELQKGNELALPTQFMKFLYLASRYNESKGKPEEIEKKQEFVNQHVSYFDDILQLINDFSKRVILADANLEKINKLYQDNKENISVDELANNIINLFTFTSLGAPAAFKFFDKIVDRKRYTSTKEVLNSTLIHQSITGLYETRIDLGKLGED

SEQ ID NO: 331 - protein, 1370 aa, Streptococcus agalactiae
MNKPYSIGLDIGTNSVGYSVVTDDYKVPAKKMRVLGNTDKEYIKKNLIGALLFDGGNTASDRRLKRTARRRYTCRRNRILYLQEIFAEEMSKVDDSFFHRLEDSFLVEDDKRGSKYPIFATMQEEKDYHEKFPTIYHLRKELADKKEKANLRLVYLALAHIIKFRGHFLIEDDSFDVRNTDIQRQYQAFLEIFDTTFENNHLLSQNIDVEGILTDKISKSAKKDRILAQYPNQKSTGIFAEFLKLIVGNQADFKKHFNLEDKTPLQFAKDSYDEDLENLLGQIGDEFADLFSVAKKLYDSVLLSGILTVTDLSTKAPLSASMIQRYDEHREDLKQLKQFVKASLPEKYQEIFTDSSKDGYAGYIEGKTNQGAFYKYLSKLLTKQEGSEYFLEKIKNEDFLRKQRTFDNGSIPHQVHLTELKAIIRRQSEYYPFLKENLDRIEKILTFRIPYYVGPLAREKSDFAWMTRKTDDSIRPWNFEELVDKEASAEAFIHRMTNNDLYLPEEKVLPKHSLIYEKFTVYNELTKVRYKNEQGETYFFDSNIKQEIFDGVFKEHRKVSKKKLLDFLAKEYEEFRIVDVIGLDKENKAFNASLGTYHDLKKILDKDFLDNPDNESILEDIVQTLTLFEDREMIKKRLENYKDLFTESQLKKLYRRHYTGWGRLSAKLINGIRDKESQKTILDYLISDGRANRNFMQLIHDDGLSFKPIIDKAQAGSHSDNLKEVVGELAGSPAIKKGILQSLKIVDELVKVMGYEPEQVVVEMARENQTTNQGRRNTRQRYKLLEEGVKNLASDLNGNILKEYPTDNQALQNERLFLYYLQNGRDMYTGEALDIDNLSQYDIDHIVPQAFIKDDSIDNRVLVSSAKNRGKSDNVPSIDIVKARKAFWKKLLDAKLMSQRKYDNLTKAERGGLTSDDKARFIQRQLVETRQITKHVARILDERFNNELDSKGRRIRKVKIVTLKSNLVSNFRKEFGFYKIREVNDYHHAHDAYLNAVVAKAILTKYPQLEPEFVYGDYPKYNSYKTRKSATEKLFFYSNIMNFFKTKVTLADGTVVVKDDIEVNNDTGEIVWDKKKHFATVRKVLSYPQVNIVKKTEIQTGGFSKESILAHGNSDKLIPRKTKDIYLDPKKYGGFDSPIVAYSVLVVADIKKGKAQKLKTVTELLGITIMERFRFEKNPSAFLESKGYLNIRDDKLMILPKYSLFELENGRRRLLASAGELQKGNELALPTQYMKFLYLASRYNELKGKPEEIEQKQEFVVQHVSYFDDILQIINDFSNRVILADANLEKINKLYQDNKENISVDELANNIINLFTFTSLGAPAAFKFFDKIVDRKRYTSTKEVLNSTLIHQSITGLYETRIDLGKLGED

SEQ ID NO: 332 - protein, 1370 aa, Streptococcus agalactiae
MNKPYSIGLDIGTNSVGYSVVTDDYKVPAKKMRVLGNTDKEYIKKNLIGALLFDGGNTASDRRLKRTARRRYTRRRNRILYLQEIFAEEMSKVDDSFFHRLEDSFLVEDDKRGSKYPIFATMQEEKDYHEKFPTIYHLRKELADKKEKADLRLVYLALAHIIKFRGHFLIEDDSFDVRNTDIQRQYQAFLEIFDTTFENNHLLSQNIDVEGILTDKISKSAKKDRILAQYPNQKSTGIFAEFLKLIVGNQADFKKHFNLEDKTPLQFAKDSYDEDLENLLGQIGDEFADLFSVAKKLYDSVLLSGILTVTDLSTKAPLSASMIQRYDEHREDLKQLKQFVKASLPEKYQEIFTDSSKDGYAGYIEGKTNQGAFYKYLSKLLTKQEGSEYFLEKIKNEDFLRKQRTFDNGSIPHQVHLTELKAIIRRQSEYYPFLKENLDRIEKILTFRIPYYVGPLAREKSDFAWMTRKTDDSIRPWNFEELVDKEASAEAFIHRMTNNDLYLPEEKVLPKHSLIYEKFTVYNELTKVRYKNEQGETYFFDSNIKQEIFDGVFKEHRKVSKKKLLDFLAKEYEEFRIVDVIGLDKENKAFNASLGTYHDLKKILDKDFLDNPDNESILEDIVQTLTLFEDREMIKKRLENYKDLFTESQLKKLYRRHYTGWGRLSAKLINGIRDKESQKTILDYLISDGRANRNFMQLIHDDGLSFKPIIDKAQAGSHSDNLKEVVGELAGSPAIKKGILQSLKIVDELVKVMGYEPEQVVVEMARENQTTNQGRRNTRQRYKLLEEGVKNLASDLNGNILKEYPTDNQALQNERLFLYYLQNGRDMYTGEALDIDNLSQYDIDHIVPQAFIKDDSIDNRVLVSSAKNRGKSDNVPSIDIVKARKAFWKKLLDAKLMSQRKYDNLTKAERGGLTSDDKARFIQRQLVETRQITKHVARILDERFNNELDSKGRRIRKVKIVTLKSNLVSNFRKEFGFYKIREVNDYHHAHDAYLNAVVAKAILTKYPQLEPEFVYGDYPKYNSYKTRKSATEKLFFYSNIMNFFKTKVTLADGTVVVKDDIEVNNDTGEIVWDKKKHFATVRKVLSYPQVNIVKKTEIQTGGFSKESILAHGNSDKLIPRKTKDIYLDPKKYGGFDSPIVAYSVLVVADIKKGKAQKLKTVTELLGITIMERFRFEKNPSAFLESKGYLNIRDDKLMILPKYSLFELENGRRRLLASAGELQKGNELALPTQYMKFLYLASRYNELKGKPEEIEQKQEFVVQHVSYFDDILQIINDFSNRVILADANLEKINKLYQDNKENISVDELANNIINLFTFTSLGAPAAFKFFDKIVDRKRYTSTKEVLNSTLIHQSITGLYETRIDLGKLGED

SEQ ID NO: 333 - protein, 1370 aa, Streptococcus agalactiae
MNKPYSIGLDIGTNSVGYSVVTDDYKVPAKKMRVLGNTDKEYIKKNLIGALLFDGGNTASDRRLKRTARRRYTRRRNRILYLQEIFAEEMSKVDDSFFHRLEDSFLVEDDKRGSKYPIFATMQEEKDYHEKFPTIYHLRKELADKKEKADLRLVYLALAHIIKFRGHFLIEDDSFDVRNTDIQRQYQAFLEIFDTTFENNHLLSQNIDVEGILTDKISKSAKKDRILAQYPNQKSTGIFAEFLKLIVGNQADFKKHFNLEDKTPLQFAKDSYDEDLENLLGQIGDEFADLFSVAKKLYDSVLLSGILTVTDLSTKAPLSASMIQRYDEHREDLKQLKQFVKASLPEKYQEIFTDSSKDGYAGYIEGKTNQGAFYKYLSKLLTKQEGSEYFLEKIKNEDFLRKQRTFDNGSIPHQVHLTELKAIIRRQSEYYPFLKENLDRIEKILTFRIPYYVGPLAREKSDFAWMTRKTDDSIRPWNFEELVDKEASAEAFIHRMTNNDLYLPEEKVLPKHSLIYEKFTVYNELTKVRYKNEQGETYFFDSNIKQEIFDGVFKEHRKVSKKKLLDFLAKEYEEFRIVDVIGLDKENKAFNASLGTYHDLKKILDKDFLDNPDNESILEDIVQTLTLFEDREMIKKRLENYKDLFTESQLKKLYRRHYTGWGRLSAKLINGIRDKESQKTILDYLISDGRANRNFMQLIHDDGLSFKPIIDKAQAGSHSDNLKEVVGELAGSPAIKKGILQSLKIVDELVKVMGYEPEQVVVEMARENQTTNQGRRNTRQRYKLLEEGVKNLASDLNGNILKEYPTDNQALQNERLFLYYLQNGRDMYTGETLDIDNLSQYDIDHIVPQAFIKDDSIDNRVLVSSAKNRGKSDNVPSIDIVKARKAFWKKLLDAKLMSQRKYDNLTKAERGGLTSDDKARFIQRQLVETRQITKHVARILDERFNNELDSKGRRIRKVKIVTLKSNLVSNFRKEFGFYKIREVNDYHHAHDAYLNAVVAKAILTKYPQLEREFVYGDYPKYNSYKTRKSATEKLFFYSNIMNFFKTKVTLADGTVVVKDDIEVNNDTGEIVWDKKKHFATVRKVLSYPQVNIVKKTEIQTGGFSKESILAHGNSDKLIPRKTKDIYLDPKKYGGFDSPIVAYSVLVVADIKKGKAQKLKTVTELLGITIMERFRFEKNPSAFLESKGYLNIRDDKLMILPKYSLFELENGRRRLLASAGELQKGNELALPTQYMKFLYLASRYNELKGKPEEIEQKQEFVVQHVSYFDDILQIINDFSNRVILADANLEKINKLYQDNKENISVDELANNIINLFTFTSLGAPAAFKFFDKIVDRKRYTSTKEVLNSTLIHQSITGLYETRIDLGKLGED

SEQ ID NO: 334 - protein, 1370 aa, Streptococcus agalactiae
MNKPYSIGLDIGTNSVGYSVVTDDYKVPAKKMRVLGNTDKEYIKKNLIGALLFDGGNTASDRRLKRTARRRYTRRRNRILYLQEIFAEEMSKVDDSFFHRLEDSFLVEDDKRGSKYPIFATMQEEKDYHEKFPTIYHLRKELADKKEKADLRLVYLALAHIIKFRGHFLIEDDSFDVRNTDIQRQYQAFLEIFDTTFENNHLLSQNIDVEGILTDKISKSAKKDRILAQYPNQKSTGIFAEFLKLIVGNQADFKKHFNLEDKTPLQFAKDSYDEDLENLLGQIGDEFADLFSVAKKLYDSVLLSGILTVTALSTKAPLSASMIQRYDEHREDLKQLKQFVKASLPEKYQEIFTDSSKDGYAGYIEGKTNQGAFYKYLSKLLTKQEGSEYFLEKIKNEDFLRKQRTFDNGSIPHQVHLTELKAIIRRQSEYYPFLKENLDRIEKILTFRIPYYVGPLAREKSDFAWMTRKTDDSIRPWNFEELVDKEASAEAFIHRMTNNDLYLPEEKVLPKHSLIYEKFTVYNELTKVRYKNEQGETYFFDSNIKQEIFDGVFKEHRKVSKKKLLDFLAKEYEEFRIVDVIGLDKENKAFNASLGTYHDLKKILDKDFLDNPDNESILEDIVQTLTLFEDREMIKKRLENYKDLFTESQLKKLYRRHYTGWGRLSAKLINGIRDKESQKTILDYLISDGRANRNFMQLIHDDGLSFKPIIDKAQAGSHSDNLKEVVGELAGSPAIKKGILQSLKIVDELVKVMGYEPEQVVVEMARENQTTNQGRRNTRQRYKLLEEGVKNLASDLNGNILKEYPTDNQALQNERLFLYYLQNGRDMYTGEALDIDNLSQYDIDHIVPQAFIKDDSIDNRVLVSSAKNRGKSDNVPSIDIVKARKAFWKKLLDAKLMSQRKYDNLTKAERGGLTSDDKARFIQRQLVETRQITKHVARILDERFNNELDSKGRRIRKVKIVTLKSNLVSNFRKEFGFYKIREVNDYHHAHDAYLNAVVAKAILTKYPQLEPEFVYGDYPKYNSYKTRKSATEKLFFYSNIMNFFKTKVTLADGTVVVKDDIEVNNDTGEIVWDKKKHFATVRKVLSYPQVNIVKKTEIQTGGFSKESILAHGNSDKLIPRKTKDIYLDPKKYGGFDSPIVAYSVLVVADIKKGKAQKLKTVTELLGITIMERFRFEKNPSAFLESKGYLNIRDDKLMILPKYSLFELENGRRRLLASAGELQKGNELALPTQYMKFLYLASRYNELKGKPEEIEQKQEFVVQHVSYFDDILQIINDFSNRVILADANLEKINKLYQDNKENISVDELANNIINLFTFTSLGAPAAFKFFDKIVDRKRYTSTKEVLNSTLIHQSITGLYETRIDLGKLGED

SEQ ID NO: 335 - protein, 1370 aa, Streptococcus agalactiae
MNKPYSIGLDIGTNSVGYSVVTDDYKVPAKKMRVLGNTDKEYIKKNLIGALLFDGGNTASDRRLKRTARRRYTRRRNRILYLQEIFAEEMSKVDDSFFHRLEDSFLVEDDKRGSKYPIFATMQEEKDYHEKFPTIYHLRKELADKKEKANLRLVYLALAHIIKFRGHFLIEDDSFDVRNTDIQRQYQAFLEIFDTTFENNHLLSQNIDVEGILTDKISKSAKKDRILAQYPNQKSTGIFAEFLKLIVGNQADFKKHFNLEDKTPLQFAKDSYDEDLENLLGQIGDEFADLFSVAKKLYDSVLLSGILTVTDLSTKAPLSASMIQRYDEHREDLKQLKQFVKASLPEKYQEIFTDSSKDGYAGYIEGKTNQGAFYKYLSKLLTKQEGSEYFLEKIKNEDFLRKQRTFDNGSIPHQVHLTELKAIIRRQSEYYPFLKENLDRIEKILTFRIPYYVGPLAREKSDFAWMTRKTDDSIRPWNFEELVDKEASAEAFIHRMTNNDLYLPEEKVLPKHSLIYEKFTVYNELTKVRYKNEQGETYFFDSNIKQEIFDGVFKEHRKVSKKKLLDFLAKEYEEFRIVDVIGLDKENKAFNASLGTYHDLKKILDKDFLDNPDNESILEDIVQTLTLFEDREMIKKRLENYKDLFTESQLKKLYRRHYTGWGRLSAKLINGIRDKESQKTILDYLISDGRANRNFMQLIHDDGLSFKPIIDKAQAGSHSDNLKEVVGELAGSPAIKKGILQSLKIVDELVKVMGYEPEQVVVEMARENQTTNQGRRNTRQRYKLLEEGVKNLASDLNGNILKEYPTDNQALQNERLFLYYLQNGRDMYTGEALDIDNLSQYDIDHIVPQAFIKDDSIDNRVLVSSAKNRGKSDNVPSIDIVKARKAFWKKLLDAKLMSQRKYDNLTKAERGGLTSDDKARFIQRQLVETRQITKHVARILDERFNNELDSKGRRIRKVKIVTLKSNLVSNFRKEFGFYKIREVNDYHHAHDAYLNAVVAKAILTKYPQLEPEFVYGDYPKYNSYKTRKSATEKLFFYSNIMNFFKTKVTLADGTVVVKDDIEVNNDTGEIVWDKKKHFATVRKVLSYPQVNIVKKTEIQTGGFSKESILAHGNSDKLIPRKTKDIYLDPKKYGGFDSPIVAYSVLVVADIKKGKAQKLKTVTELLGITIMERFRFEKNPSAFLESKGYLNIRDDKLMILPKYSLFELENGRRRLLASAGELQKGNELALPTQYMKFLYLASRYNELKGKPEEIEQKQEFVVQHVSYFDDILQIINDFSNRVILADANLEKINKLYQDNKENISVDELANNIINLFTFTSLGAPAAFKFFDKIVDRKRYTSTKEVLNSTLIHQFITGLYETRIDLGKLGED

SEQ ID NO: 336 - protein, 1370 aa, Streptococcus agalactiae
MNKPYSIGLDIGTNSVGYSVVTDDYKVPAKKMRVLGNTDKEYIKKNLIGALLFDGGNTASDRRLKRTARRRYTRRRNRILYLQEIFAEEMSKVDDSFFHRLEDSFLVEDDKRGSKYPIFATMQEEKDYHEKFPTIYHLRKELADKKEKANLRLVYLALAHIIKFRGHFLIEDDSFDVRNTDIQRQYQAFLEIFDTTFENNHLLSQNIDVEGILTDKISKSAKKDRILAQYPNQKSTGIFAEFLKLIVGNQADFKKHFNLEDKTPLQFAKDSYDEDLENLLGQIGDEFADLFSVAKKLYDSVLLSGILTVTDLSTKAPLSASMIQRYDEHREDLKQLKQFVKASLPEKYQEIFTDSSKDGYAGYIEGKTNQGAFYKYLSKLLTKQEGSEYFLEKIKNEDFLRKQRTFDNGSIPHQVHLTELKAIIRRQSEYYPFLKENLDRIEKILTFRIPYYVGPLAREKSDFAWMTRKTDDSIRPWNFEELVDKEASAEAFIHRMTNNDLYLPEEKVLPKHSLIYEKFTVYNELTKVRYKNEQGETYFFDSNIKQEIFDGVFKEHRKVSKKKLLDFLAKEYEEFRIVDVIGLDKENKAFNASLGTYHDLKKILDKDFLDNPDNESILEDIVQTLTLFEDREMIKKRLENYKDLFTESQLKKLYRRHYTGWGRLSAKLINGIRDKESQKTILDYLISDGRANRNFMQLIHDDGLSFKPIIDKAQAGSHSDNLKEVVGELAGSPAIKKGILQSLKIVDELVKVMGYEPEQVVVEMARENQTTNQGRRNTRQRYKLLEEGVKNLASDLNGNILKEYPTDNQALQNERLFLYYLQNGRDMYTGEALDIDNLSQYDIDHIVPQAFIKDDSIDNRVLVSSAKNRGKSDNVPSIDIVKARKAFWKKLLDAKLMSQRKYDNLTKAERGGLTSDDKARFIQRQLVETRQITKHVARILDERFNNELDSKGRRIRKVKIVTLKSNLVSNFRKEFGFYKIREVNDYHHAHDAYLNAVVAKAILTKYPQLEPEFVYGDYPKYNSYKTRKSATEKLFFYSNIMNFFKTKVTLADGTVVVKDDIEVNNDTGEIVWDKKKHFATVRKVLSYPQVNIVKKTEIQTGGFSKESILAHGNSDKLIPRKTKDIYLDPKKYGGFDSPIVAYSVLVVADIKKGKAQKLKTVTELLGITIMERFRFEKNPSAFLESKGYLNIRDDKLMILPKYSLFELENGRRRLLASAGELQKGNELALPTQYMKFLYLASRYNELKGKPEEIEQKQEFVVQHVSYFDDILQIINDFSNRVILADANLEKINKLYQDNKENISVDELANNIINLFTFTSLGAPAAFKFFDKIVDRKRYTSTKEVLNSTLIHQSITGLYETRIDLGKLGED

SEQ ID NO: 337 - protein, 1370 aa, Streptococcus agalactiae
MNKPYSIGLDIGTNSVGYSVVTDDYKVPAKKMRVLGNTDKEYIKKNLIGALLFDGGNTASDRRLKRTARRRYTRRRNRILYLQEIFAEEMSKVDDSFFHRLEDSFLVEDDKRGSKYPIFATMQEEKDYHEKFPTIYHLRKELADKKEKANLRLVYLALAHIIKFRGHFLIEDDSFDVRNTDIQRQYQAFLEIFDTTFENNHLLSQNIDVEGILTDKISKSAKKDRILAQYPNQKSTGIFAEFLKLIVGNQADFKKHFNLEDKTPLQFAKDSYDEDLENLLGQIGDEFADLFSVAKKLYDSVLLSGILTVTDLSTKAPLSASMIQRYDEHREDLKQLKQFVKASLPEKYQEIFTDSSKDGYAGYIESKTNQGAFYKYLSKLLTKQEGSEYFLEKIKNEDFLRKQRTFDNGSIPHQVHLTELKAIIRRQSEYYPFLKENLDRIEKILTFRIPYYVGPLAREKSDFAWMTRKTDDSIRPWNFEELVDKEASAEAFIHRMTNNDLYLPEEKVLPKHSLIYEKFTVYNELTKVRYKNEQGETYFFDSNIKQEIFDGVFKEHRKVSKKKLLDFLAKEYEEFRIVDVIGLDKENKAFNASLGTYHDLKKILDKDFLDNPDNESILEDIVQTLTLFEDREMIKKRLENYKDLFTESQLKKLYRRHYTGWGRLSAKLINGIRDKESQKTILDYLISDGRANRNFMQLIHDDGLSFKPIIDKAQAGSHSDNLKEVVGELAGSPAIKKGILQSLKIVDELVKVMGYEPEQVVVEMARENQTTNQGRRNTRQRYKLLEEGVKNLASDLNGNILKEYPTDNQALQNERLFLYYLQNGRDMYTGEALDIDNLSQYDIDHIVPQAFIKDDSIDNRVLVSSAKNRGKSDNVPSIDIVKARKAFWKKLLDAKLMSQRKYDNLTKAERGGLTSDDKARFIQRQLVETRQITKHVARILDERFNNELDSKGRRIRKVKIVTLKSNLVSNFRKEFGFYKIREVNDYHHAHDAYLNAVVAKAILTKYPQLEPEFVYGDYPKYNSYKTRKSATEKLFFYSNIMNFFKTKVTLADGTVVVKDDIEVNNDTGEIVWDKKKHFATVRKVLSYPQVNIVKKTEIQTGGFSKESILAHGNSDKLIPRKTKDIYLDPKKYGGFDSPIVAYSVLVVADIKKGKAQKLKTVTELLGITIMERFRFEKNPSAFLESKGYLNIRDDKLMILPKYSLFELENGRRRLLASAGELQKGNELALPTQYMKFLYLASRYNELKGKPEEIEQKQEFVVQHVSYFDDILQIINDFSNRVILADANLEKINKLYQDNKENISVDELANNIINLFTFTSLGAPAAFKFFDKIVDRKRYTSTKEVLNSTLIHQSITGLYETRIDLGKLGED

SEQ ID NO: 338 - protein, 1376 aa, Streptococcus mitis
MNNKPYSIGLDIGTNSVGWAVITDDYKVPSKKMKVLGNTDKHFIKKNLLGALLFDEGTTAEDRRLKRTARRRYTRRKNRLRYLQEIFTEEMSKVDISFFHRLDDSFLVPEDKRGSKYPIFATLEEEKEYHKNFPTIYHLRKHLADSKEKADFRLIYLALAHIIKYRGHFLYEESFDIKNNDIQKIFNEFISIYDNTFEGSSLNGQNAQVEAIFTDKISKSAKRERVLKLFPDEKSTGLFSEFLKLIVGNQADFKKHFDLEEKAPLQFSKDTYDEDLENLLVQIGDDFADLFLVAKKLYDAILLSGILTVTDPSTKAPLSASMIDRYENHQKDLAALKQFIKTNLPEKYDEVFSDQSKDGYAGYIDGKTTQEAFYKYIKNLLSKLEGADYFLDKIEREDFLRKQRTFDNGSIPHQIHLQEMNAIIRRQGEHYPFLQENKEKIEKILTFRIPYYVGPLARGNRDFAWLTRNSDQAIRPWNFEEIVDKARSAEDFINKMTNYDLYLPEEKVLPKHSLLYETFAVYNELTKVKFIAEGLRDYQFLDSGQKQQIVTQLFKEKRKVTEKDIIQYLHNVDSYDGIELKGIEKQFNASLSTYHDLLKIIKDKEFMDDSKNEAILENIVHTLTIFEDREMIKQRLAHYASIFDEKVIKALTRRHYTGWGKLSAKLINGIYDKQSKKTILDYLIDDGEINRNFMQLINDDGLSFKEIIQKAQVVGKTNDVKQVVQELPGSPAIKKGILQSIKLVDELVKVMGHAPESIVIEMARENQTTARGKKNSQQRYKRIEDALKNLAHGLDSNILKEHPTDNIQLQNDRLFLYYLQNGKDMYTGKSLDINQLSSCDIDHIIPQAFIKDDSLDNRVLTSSKDNRGKSDNVPSLEIVQKRKAFWQQLLDSKLISERKFNNLTKAERGGLDERDKVGFIKRQLVETRQITKHVAQILDARFNTEVTEKDKKDRSVKIITLKSNLVSNFRKEFRLYKVREINDYHHAHDPYLNAVVAKAILKKYPKLEPEFVYGDYQKYDLKRYISRTKDPKEVEKATEKYFFYSNLLNFFKEEVHYADGTIVKRENIEYSKDTGEIAWNKEKDFATIKKVLSLPQVNIVKKTEEQTVGQNGGLFDNNIVSKKKVVDASKLTPIKSGLSPEKYGGYARPTIAYSVLVIADIEKGKAKKLKRIKEMVGITVQDKKKFEANPIAYLEECGYKNINPNLIIKLPKYSLFEFNNGQRRLLASSIELQKGNELIVPYHFTALLYHAQRINKISEPIHKQYVETHQSEFKELLTAIISLSKKYIQKPNVESLLQQAFDQSDKDIYQLSESFISLLKLISFGAPGTFKFLGVEISQSNVRYQSVSSCFNATLIHQSITGLYETRIDLSKLGED

SEQ ID NO: 339 - protein, 1371 aa, Unknown
  Streptococcus sp. taxon 056
MNNNNYSIGLDIGTNSVGWAVITDDYKVPSKKMRVLGNTDKRFIKKNLIGALLFDEGTTAEDRRLKRTARRRYTRRKNRLRYLQEIFAEEMSKVDSSFFHRLDDSFLVPEDKSGSKYPIFATLAEEKEYHKKFPTIYHLRKHLADSKEKADLRLIYLALAHITKYRGHFLYEEAFDIKNNDIQKIFNEFINIYDNTFEGSSLSGQNAQVEAIFTGKISKSVKREHVLKLFPDEKSTGLFSEFLKLIVGNQADFKKHFDLEEKASLQFSKDTYDEDLENLLGQIGDDFADLFLVAKKLYDAILLSGILTVTDPSTKAPLSASMIERYENHQEDLAALKQFIKNNLPEKYAEVFSDQSKDGYAGYIDGKTTQEAFYKYIKNLLSKFEGADYFLDKIEREDFLRKQRTFDNGSIPHQIHLQEMNAILRRQGEHYPLLKENKEKIEKILTFRIPYYVGPLARGNRDFAWLTRNSDQAIRPWNFEEIVDKASSAESFINKMTNYDLYLPEEKVLPKHSLLYETFAVYNELTKVKFIAEGLRDYQFFDSGQKKQIVNQLFKEKRKVTEKDIIHYLHNVDGYDGIELKGIEKQFNASLSTYHDLLKIIKDKEFMDNHKNQEILENIVHTLTIFEDREMIKQRLAQYDSIFDEKVIKALTRRHYTGWGKLSAKLINGICDKKTGKTILDYLIDDGYNNRNFMQLINDDGLSFKEIIQKAQVVGKTDDLTQVVRELSGSPAIKKGILQSIKIVDELVKIMGYAPESIVIEMARENQTTAKGKKNSQQRYKRIEDALKNLAPGLDSTISKENPTDNIQLQNDRLFLYYLQNGKDMYTGEALDINQLSSYDIDHIIPQAFIKDDSLDNRVLTSSKDNRGKSDNVPSLEVVKKRKAFWQQLLDSKLISERKFNNLTKAERGGLDERDKVGFIKRQLVETRQITKHVARILDARFNTEVSEKNQKIRSVKIITLKSNLVSNFRKEFKLYKVREINDYHHAHDAYLNAVVAKAILKKYPKLEPEFVYGDYQKYDLKRYISKSKDPKEVEKATEKYFFYSNLLNFFKEEVHYADGTIVKRENIEYSKDTGEIAWNKEKDFVTIKKVLSYPQVNIVKKREVQTGGFSKESILPKGNSDKLIPRKTKDILWDTTKYGGFDSPVIAYSILLIADIEKGKAKKLKTVKTLVGITIMEKAAFEKNPITFLENKGYHNVRKENILCLPKYSLFELENGRRRLLASAKELQKGNEIVLPVYLTTLLYHSKNVHKLDEPEHLEYIQKHRYEFKDLLNLVSEFSQKYVLAEANLEKIKSLYVDNEQADIEILANSFINLLTFTALGAPAAFKFFGKDVDRKRYTTVSEILNATLIHQSITGLYETRIDLSKLGED

SEQ ID NO: 340 - protein, 1386 aa, Streptococcus anginosus
MNQKYSIGLDIGTNSVGWAVITDDYKVPAKKMKVLGNTDKQSIKKNLLGALLFDSGETAEATRLKRTARRRYTRRRNRLRYLQEIFAEEMMQVDESFFQRLDDSFLVDEDKRGERHPIFGNIAAEVKYHDEFPTIYHLRKHLADISQKADLRLVYLALAHMIKFRGHFLIEGQLKAENTNVQALFKDFVEVYDKTVEESHLSEITVDALSILTEKVSKSRRLENLIAHYPAEKKNTLFGNLIALFLGLQPNFKTNFQLSEDAKLQFSKDTYEEDLEGLLGEVGDEYADLFASAKNLYDAILLSGILTVDDNSTKAPLSASMVKRYEEHQKDLKKFEDFIKVNALDQYNAIFKDKNKKGYAGYIESGVKQDEFYKYLKGILLQINGSGDFLDKIDREDFLRKQRTFDNGSIPHQIHLQEMHAILRRQGEHYPFLKENQDKIEKILTFRIPYYVGPLARKGSRFAWAEYKADEKITPWNFDDILDKEKSAEKFITRMTLNDLYLPEEKVLPKHSLLYETFTVYNELTKVKYVNEQGEAKFFDANMKQEIFDHVFKENRKVTKDKLLNYLNKEFEEFRIVNLTGLDKENKVFNSSLGTYHDLRKILNKSFLDNKENAQIIEDIIQTLTLFEDREMIRQRLQKYSDIFTKAQLKKLERRHYTGWGRLSYKLINGIRNKENKKTILDYLIDDGYANRNFMQLINDDALSFKEEIAKAQIIGDVDDIANVVHDLPGSPAIKKGILQSVKIVDELVKVMGHNPANIIIEMARENQTTDRGRRNSQQRLKLLQDSLKNLDNPVNIKNVENQQLQNDRLFLYYIQNGKDMYTGETLDINNLSQYDIDHIIPQAYIKDDSFDNRVLTSSSENRGKSDNVPSIEVVCARKADWMRLRKAGLISQRKFDNLTKAERGGLTENDKAGFIKRQLVETRQITKHVAQVLDARFNAKHDENKKVIRDVKIITLKSNLVSQFRKDFKFYKVREINDYHHAHDAYLNAVIGTALLKKYPKLASEFVYGEFKKYDVRKFIAKSDKEIGKATAKYFFYSNLMNFFKKEVKFADGTVVERPDIETSEDGEIAWNKQTDFKIVRKVLSYPQVNIVKKTEVQTHGLDRGKPRGLFNANPSPKPKPDSSENLVGVKRNLDPKKYGGYAGISNSYAVLVKAIIEKGVKKKETMVLEFQGISILDRITFEKDKRAFLLGKGYKDIKKIIELPKYSLFELKDGSRRMLASILSTNNKRGEIHKGNELFVPQKFTTLLYHAKRINNPINKDHIEYVKKHRDDFKELLNYVLEFNEKYVGATKNGERLKEAVADFDSKSNEEICTSFLGAVNSKNAGLFELTSLGSASDFEFLGVKIPRYRDYTPSSLLKDSTLIHQSITGLYETRIDLSKLGED

SEQ ID NO: 341 - protein, 1332 aa, Dolosigranulum pigrum
MQKNYTIGLDIGTNSVGWAVMKDDYTLIRKRMKVLGNTDIKKIKKNFWGVRLFDEGETAKETRLKRGTRRRYQRRRNRLIYLQDIFQQPMLAIDENFFHRLDDSFFVPDDKSYDRHPIFGSLEEEVAYHNTYPTIYHLRKHLADNPEKADLRLVYTALAHIVKYRGHFLIEGELNTENTSISETFEQFLDTYSDIFKEQLVGDISKVEEILSSKQSRSRKHEQIMALFPNENKLGNFGRFMMLIVGNTSNFKPVFDLDDEYKLKLSDETYEEDLDTLLGMTDDVFLDVFMAAKNVYDAVEMSAIISTDTGNSKAVLSNQMINFYDEHKVDLAQLKQFFKTHLPDKYYECFSDPSKNGYAGYIDGKTNQEDFYKYIEKVMKTIKSDKKDYFLDKIDREVFLRKQRSFYNSVIPHQIHLQEMQAILDRQSQYYPFLAENRDKIESLVTFRIPYYVGPLTVSDQSEFAWMERQSDEPIRPWNFDEIVNKERSAEKFIERMTNMDTYLLEEKVLPKRSLLYQTFEVYNELTKVRYTNEQGKTEKLNRQQKAEIIETLFKQKNRVREKDIANYLEQYGYVDGTDIKGVEDKFNASLSTYNDLAKIDGAKAYLDDPEYADVWEDIIKILTIFEDKAMRKKQLQTYSDTLSPEILKKLERKHYTGWGRFSKKLINGLRDEGSNKTILDYLKSDEGSSGPTNRNFMQLIRDNTLSFKKKIEDAQTIEDTTHIYDTVAELPGSPAIKKGIRQALKIVEEIIDIIGYEPENIVVEMARESQTTKKGKDLSKERLEKLTEAIKEFDGPSDVKVKDLKNENLRNDRLYLYYLQNGRDMYTNEPLDINNLSKYDIDHIIPQSFTTDNSIDNKVLVSRTKNQGNKSDDVPSINIVHKMKPFWRQLHKAGLISDRKFKNLTKAEHGGLTEADRAHFLNRQLVETRQITKHVANLLDSQYNTAEEQRINIVLLKSSMTSRFRKEFKLYKVREINDYHHGHDAYLNAVVATTIMKVYPNLKPQFVYGQYKKTSMFKEEKATARKHFYSNITKFFKKEKVVNEETGEILWDTERHLSTIKRVLSWKQMNIVKKVEKQKGQLWKETIYPKGDSSKLIPVKEGMDPQKYGGLSQVSEAFAVVITHEKGKKKQLKSDLISIPIVDQKAYEQHPTAYLEEAGYNNPTVLHELFKYQLFELEDGSRRMIASAKEFQKGNQMVLPLELVELLYHANRYDKVKFPDSIEYVHDNLAKFDDLLEYVIDFSNKYINADKNVQKIQKIYKEHGTEDVELTVESFVNLMTFTAMGAPATFKFYGESITRSRYTSITEFRGSTLIFQSITGLYETRYKLEDN

SEQ ID NO: 342 - protein, 1368 aa, Streptococcus iniae
MRKPYSIGLDIGTNSVGWAVITDDYKVPSKKMRIQGTTDRTSIKKNLIGALLFDNGETAEATRLKRTTRRRYTRRKYRIKELQKIFSSEMNELDIAFFPRLSESFLVSDDKEFENHPIFGNLKDEITYHNDYPTIYHLRQTLADSDQKADLRLIYLALAHIIKFRGHFLIEGNLDSENTDVHVLFLNLVNIYNNLFEEDIVETASIDAEKILTSKTSKSRRLENLIAEIPNQKRNMLFGNLVSLALGLTPNFKTNFELLEDAKLQISKDSYEEDLDNLLAQIGDQYADLFIAAKKLSDAILLSDIITVKGASTKAPLSASMVQRYEEHQQDLALLKNLVKKQIPEKYKEIFDNKEKNGYAGYIDGKTSQEEFYKYIKPILLKLDGTEKLISKLEREDFLRKQRTFDNGSIPHQIHLNELKAIIRRQEKFYPFLKENQKKIEKLFTFKIPYYVGPLANGQSSFAWLKRQSNESITPWNFEEVVDQEASARAFIERMTNFDTYLPEEKVLPKHSPLYEMFMVYNELTKVKYQTEGMKRPVFLSSEDKEEIVNLLFKKERKVTVKQLKEEYFSKMKCFHTVTILGVEDRFNASLGTYHDLLKIFKDKAFLDDEANQDILEEIVWTLTLFEDQAMIERRLVKYADVFEKSVLKKLKKRHYTGWGRLSQKLINGIKDKQTGKTILGFLKDDGVANRNFMQLINDSSLDFAKIIKNEQEKTIKNESLEETIANLAGSPAIKKGILQSIKIVDEIVKIMGQNPDNIVIEMARENQSTMQGIKNSRQRLRKLEEVHKNTGSKILKEYNVSNTQLQSDRLYLYLLQDGKDMYTGKELDYDNLSQYDIDHIIPQSFIKDNSIDNTVLTTQASNRGKSDNVPNIETVNKMKSFWYKQLKSGAISQRKFDHLTKAERGALSDFDKAGFIKRQLVETRQITKHVAQILDSRFNSNLTEDSKSNRNVKIITLKSKMVSDFRKDFGFYKLREVNDYHHAQDAYLNAVVGTALLKKYPKLEAEFVYGDYKHYDLAKLMIQPDSSLGKATTRMFFYSNLMNFFKKEIKLADDTIFTRPQIEVNTETGEIVWDKVKDMQTIRKVMSYPQVNIVMKTEVQTGGFSKESIWPKGDSDKLIARKKSWDPKKYGGFDSPIIAYSVLVVAKIAKGKTQKLKTIKELVGIKIMEQDEFEKDPIAFLEKKGYQDIQTSSIIKLPKYSLFELENGRKRLLASAKELQKGNELALPNKYVKFLYLASHYTKFTGKEEDREKKRSYVESHLYYFDEIMQIIVEYSNRYILADSNLIKIQNLYKEKDNFSIEEQAINMLNLFTFTDLGAPSAFKFFNGDIDRKRYSSTNEIINSTLIYQSPTGLYETRIDLSKLGGK

SEQ ID NO: 343 - protein, 1334 aa, Listeria ivanovii
MRKPYTIGLDIGTNSVGWAVLTDQYNLVKRKMKVAGSAEKKQIKKNFWGVRLFDEGEVAAGRRMNRTTRRRIERRRNRIAYLQEIFAAEMAEVDANFFYRLEDSFYIESEKRHSRHPFFATIEEEVAYHEEYKTIYHLREKLVNSSDKADLRLVYLALAHIIKYRGNFLIEGMLDTKNTSVDEVFKQFIQTYNQIFASDIEEGSLTRLEENKEVAEILSEKLTRREKLDKILKLYTGEKSTGMFARFINLIIGSKGDFKKVFDLDEKAEIECAKDTYEEDLEALLAKIGDEYAEIFVAAKSTYNAVVLSNIITVTDTETKAKLSASMIERFDKHAKDLKRLKAFFKMQLPEKFNEVFNDIEKDGYAGYIDGKTTQEKFYKYMKKMLANIDGADYFIDQIEEENFLRKQRTFDNGTIPHQLHLEELEAILHQQAKYYPFLRKDYEKIRSLVTFRIPYFIGPLANGQSDFAWLTRKADGEIRPWNIEEKVDFGKSAIDFIEKMTNKDTYLPKENVLPKHSLCYQKYMVYNELTKIRYIDDQGKTHHFSGQEKQQIFNGLFKQQRKVKKKDLERFLYTINHIESPTIEGVEDAFNSSFATYHDLQKGGVTQEILDNPLNADMLEEIVKILTVFEDKRMIKEQLQSFSDVLDGTILKKLERRHYTGWGRLSAKLLTGIRDKHSHLTILDYLMNDDGLNRNLMQLINDSNLSFKSIIEKEQVSTADKGIQSIVAELAGSPAIKKGILQSLKIVDELVGIMGYPPQTIVVEMARENQTTGKGKNNSKPRFISLEKAIKEFGSQILKEHPTDNQCLKNDRLYLYYLQNGKDMYTGKELDIHNLSNYDIDHIIPQSFITDNSIDNRVLVSSTANREKGDNVPLLEVVRKRKAFWEKLYQAKLMSKRKFDYLTKAERGGLTEADKANFIQRQLVETRQITKNVANILYQRFNCKQDENGNEVEQVRIVTLKSTLVSQFRKQFQLYKVREVNDYHHAHDAYLNGVVANTLLKVYPQLEPEFVYGDYHQFDWFKANKATAKKQFYTNIMRFFAKENQIIDKNGEILWDNRYLDTIKKVLSYRQMNIVKKTEIQKGEFSNATVNPKGNSSKLISRKADWNPIKYGGFDGSNMAYSIVIEYEKRKKKTVIKKELIQINIMERVAFEKDQKAFLEEKGYYSPKVLTKIPKYTLYECENGRRRMLGSANEAQKGNQMVLPNHLMTLLYHAKNCEANDGESLAYIEMHREMFAELLAYISEFAKRYTLANDRLEKINMFFEQNKKGDIKVIAKSFDKLKVFNAFGAPRDFEFFETTIKRKRYYNIKELLNATIIYQSITGLYEARKRLED

SEQ ID NO: 344 - protein, 1288 aa, Unknown
  Enterococcus-multispecies
MRLFEEGHTAEDRRLKRTARRRISRRRNRLRYLQAFFEEAMTDLDENFFARLQESFLVPEDKKWHRHPIFAKLEDEVAYHETYPTIYHLRKKLADSSEQADLRLIYLALAHIVKYRGHFLIEGKLSTENTSVKDQFQQFMVIYNQTFVNGESRLVSAPLPESVLIEEELTEKASRTKKSEKVLQQFPQEKANGLFGQFLKLMVGNKADFKKVFGLEEEAKITYASESYEEDLEGILAKVGDEYSDVFLAAKNVYDAVELSTILADSDKKSHAKLSSSMIVRFTEHQEDLKKFKRFIRENCPDEYDNLFKNEQKDGYAGYIAHAGKVSQLKFYQYVKKIIQDIAGAEYFLEKIAQENFLRKQRTFDNGVIPHQIHLAELQAIIHRQAAYYPFLKENQEKIEQLVTFRIPYYVGPLSKGDASTFAWLKRQSEEPIRPWNLQETVDLDQSATAFIERMTNFDTYLPSEKVLPKHSLLYEKFMVFNELTKISYTDDRGIKANFSGKEKEKIFDYLFKTRRKVKKKDIIQFYRNEYNTEIVTLSGLEEDQFNASFSTYQDLLKCGLTRAELDHPDNAEKLEDIIKILTIFEDRQRIRTQLSTFKGQFSAEVLKKLERKHYTGWGRLSKKLINGIYDKESGKTILDYLVKDDGVSKHYNRNFMQLINDSQLSFKNAIQKAQSSEHEETLSETVNELAGSPAIKKGIYQSLKIVDELVAIMGYAPKRIVVEMARENQTTSTGKRRSIQRLKIVEKAMAEIGSNLLKEQPTTNEQLRDTRLFLYYMQNGKDMYTGDELSLHRLSHYDIDHIIPQSFMKDDSLDNLVLVGSTENRGKSDDVPSKEVVKDMKAYWEKLYAAGLISQRKFQRLTKGEQGGLTLEDKAHFIQRQLVETRQITKNVAGILDQRYNAKSKEKKVQIITLKASLTSQFRSIFGLYKVREVNDYHHGQDAYLNCVVATTLLKVYPNLAPEFVYGEYPKFQTFKENKATAKAIIYTNLLRFFTEDEPRFTKDGEILWSNSYLKTIKKELNYHQMNIVKKVEVQKGGFSKESIKPKGPSNKLIPVKNGLDPQKYGGFDSPVVAYTVLFTHEKGKKPLIKQEILGITIMEKTRFEQNPILFLEEKGFLRPRVLMKLPKYTLYEFPEGRRRLLASAKEAQKGNQMVLPEHLLTLLYHAKQCLLPNQSESLAYVEQHQPEFQEILERVVDFAEVHTLAKSKVQQIVKLFEANQTADVKEIAASFIQLMQFNAMGAPSTFKFFQKDIERARYTSIKEIFDATIIYQSPTGLYETRRKVVD

SEQ ID NO: 345 - protein, 1375 aa, Unknown
  Streptococcus sp. M334
MSNKSYSIGLDIGTNSVGWAVITDDYKVPSKKMKVLGNTDKHFIKKNLIGALLFDEGTTAEDRRLKRTARRRYTRRKNRLRYLQEIFSQEISKVDSSFFHRLDDFFLVPEDKRGSKYPIFATLVEEKEYHKKFPTIYHLRKHLADSKEKTDLRLIYLALAHMIKYRGHFLYEESFDIKNNDIQKIFSEFISIYDNTFEGKSLSGQNAQVEAIFTDKISKSTKRERVLKLFPDEKSTGLFSEFLKLIVGNQADFKKHFDLEEKAPLQFSKDTYDEDLENLLGQIGDDFADLFLVAKKLYDAILLSGILTVKDLSTKAPLSASMIERYENHQKDLAALKQFIQNNLQEKYDEVFSDQSKDGYAGYIDGKTTQEAFYKYIKNLLSKFEGADYFLDKIEREDFLKKQRTFDNGSIPHQIHLQEMNAIIRRQGEHYPFLQENKEKIEKILTFRIPYYVGPLARGNGDFAWLTRNSDQAIRPWNFEEIVDQASSAEDFINKMTNYDLYLPEEKVLPKHSLLYETFAVYNELTKVKFIAEGLTRYQFLDKKQKKDIFDTFFKAENKRKVTEKDIIHYLHNVDGYDGIELKGIEKQFNASLSTYHDLLKIIKDKAFMDDSKNEEILENIIHTLTIFEDREMIKQRLAQYDSLFDEKVIKALTRRHYTGWGKLSAKLINGIRDKKSGKTILDYLIDDGEINRNFMQLIHDDGLSFKEIIQKAQVFGKTNDVKQVVQELPGSPAIKKGILQSIKIVDELVKVMGHAPESIVIEMARENQTTARGKKNSQQRYKRIEDSLKNLASGLDSNILKENPTDNIQLQNDRLFLYYLQNGRDMYTGKPLEINQLSNYDIDHIIPQAFIKDDSLDNRVLTSSKDNRGKSDNVPSLEVVEKMKAFWQQLLDSKLISERKFNNLTKAERERGGLNELDKVGFIKRQLVETRQITKHVAQFLDARFNKEVTEKDKKNRNVKIITLKSNLVSNFRKEFGLYKVREINDYHHAHDAYLNAVLAKAILKKYPKLEPEFVYGDYQKYDLQRYISKSREPKEVEKATQKYFFYSNLLNFFKEEVHYADGTIVKRENIEYSKDTGEIAWNKEKDFATVKKVLSLPQVNIVKKTEVQTGGFSKESILPKGNSDKLIPRKTKEILWDTTKYGGFDSPVIAYSILLIADIEKGKAKKLKTVKTLVGITIMEKATFEKNPITFLENKGYHNVRKENILCLPKYSLFELESGRRRMLASAKELQKGNEIVLPVYLTTLLYHSKNVHKLDEPEHLEYIQKHRYEFKDLLNLVSEFSQKYVLADANLEKIKNLYADNEQADIEILANSFINLLTFTALGAPAAFKFLGKDVDRKRYTTVSEILNATLIHQSITGLYETRIDLSKLGED

SEQ ID NO: 346 - protein, 1344 aa, Kandleria vitulina
MSQNNNKIYNIGLDIGDASVGWAVVDEHYNLLKRHGKHMWGSRLFTQANTAVERRSSRSTRRRYNKRRERIRLLREIMEDMVLDVDPTFFIRLANVSFLDQEDKKDYLKENYHSNYNLFIDKDFNDKTYYDKYPTIYHLRKHLCESKEKEDPRLIYLALHHIVKYRGNFLYEGQKFSMDVSNIEDKMIDVLRQFNEINLFEYVEDRKKIDEVLNVLKEPLSKKHKAEKAFALFDTTKDNKAAYKELCAALAGNKFNVTKMLKEAELHDEDEKDISFKFSDATFDDAFVEKQPLLGDCVEFIDLLHDIYSWVELQNILGSAHTSEPSISAAMIQRYEDHKNDLKLLKDVIRKYLPKKYFEVFRDEKSKKNNYCNYINHPSKTPVDEFYKYIKKLIEKIDDPDVKTILNKIELESFMLKQNSRTNGAVPYQMQLDELNKILENQSVYYSDLKDNEDKIRSILTFRIPYYFGPLNITKDRQFDWIIKKEGKENERILPWNANEIVDVDKTADEFIKRMRNFCTYFPDEPVMAKNSLTVSKYEVLNEINKLRINDHLIKRDMKDKMLHTLFMDHKSISANAMKKWLVKNQYFSNTDDIKIEGFQKENACSTSLTPWIDFTKIFGKINESNYDFIEKIIYDVTVFEDKKILRRRLKKEYDLDEEKIKKILKLKYSGWSRLSKKLLSGIKTKYKDSTRTPETVLEVMERTNMNLMQVINDEKLGFKKTIDDANSTSVSGKFSYAEVQELAGSPAIKRGIWQALLIVDEIKKIMKHEPAHVYIEFARNEDEKERKDSFVNQMLKLYKDYDFEDETEKEANKHLKGEDAKSKIRSERLKLYYTQMGKCMYTGKSLDIDRLDTYQVDHIVPQSLLKDDSIDNKVLVLSSENQRKLDDLVIPSSIRNKMYGFWEKLFNNKIISPKKFYSLIKTEFNEKDQERFINRQIVETRQITKHVAQIIDNHYENTKVVTVRADLSHQFRERYHIYKNRDINDFHHAHDAYIATILGTYIGHRFESLDAKYIYGEYKRIFRNQKNKGKEMKKNNDGFILNSMRNIYADKDTGEIVWDPNYIDRIKKCFYYKDCFVTKKLEENNGTFFNVTVLPNDTNSDKDNTLATVPVNKYRSNVNKYGGFSGVNSFIVAIKGKKKKGKKVIEVNKLTGIPLMYKNADEEIKINYLKQAEDLEEVQIGKEILKNQLIEKDGGLYYIVAPTEIINAKQLILNESQTKLVCEIYKAMKYKNYDNLDSEKIIDLYRLLINKMELYYPEYRKQLVKKFEDRYEQLKVISIEEKCNIIKQILATLHCNSSIGKIMYSDFKISTTIGRLNGRTISLDDISFIAESPTGMYSKKYKL

SEQ ID NO: 347 - protein, 1343 aa, Kandleria vitulina
MSQNNNKIYNIGLDIGDASVGWAVVDEHYNLLKRHGKHMWGSRLFTQANTAVERRSSRSTRRRYNKRRERIRLLRGIMEDMVLDVDPTFFIRLANVSFLDQEDKKDYLKENYHSNYNLFIDKDFNDKTYYDKYPTIYHLRKHLCESKEKEDPRLIYLALHHIVKYRGNFLYEGQKFSMDVSNIEDKMIDVLRQFNEINLFEYVEDRKKIDEVLNVLKEPLSKKHKADKAFALFDTTKDNKAAYKELCAALAGNKFNVTKMLKEAELHDEDEKDISFKFSDATFDDAFVEKQPLLGDCVEFIDLLHDIYSWVELQNILGSAHTSEPSISAAMIQRYEDHKNDLKLLKDVIRKYLPKKYFEVFRDEKSKKNNYCNYINHPSKTPVDEFYKYIKKLIEKIDDPDVKTILNKIELESFMLKQNSRTNGAVPYQMQLDELNKILENQSVYYSDLKDNEDKIRSILTFRIPYYFGPLNITKDRQFDWIIKKEGKENERILPWNANEIVDVDKTADEFIKRMRNFCTYFPDEPVLAKNSLTVSKYEVLNEINKLRINDHLIKRDIKDKMLHTLFMDHKSISANAMKKWLVKNQYFSNTDDIKIEGFQKENACSTSLTPWIDFTKIFGEINNSNYELIEKIIYDVTVFEDKKILRRRLKKEYDLDEEKIKKILKLKYSGWSRLSKKLLSGIKTKYKDSTRTPETVLEVMERTNMNLMQVINDEKLGFKKTIDDANSTSVSGKFSYAEVQELAGSPAIKRGIWQALLIVDEIKKIMKHEPAHVYIEFARNEDEKERKDSFVNQMLKLYKDYDFEDETEKEANKHLKGEDAKSKIRSERLKLYYTQMGKCMYTGKSLDIDRLDTYQVDHIVPQSLLKDDSIDNKVLVLSSENQRKLDDLVIPEMIRNKMFGFWNKLYENKIISPKKFYSLIKSEYSDKDKERFINRQIVETRQITKHVAQIISNHYETTKVVTVRADLSHAFRERYHIYKNRDINDFHHAHDAYIATILGTYIGHRFESLDAKYIYGEYQKIFRNNKNKDKEFNKNKDGFILNSMRNLYADKDTGEVVWDPEWISRIKKCFYYKDCFVTKKLEENNGSFFNLTVRPNDEHSEKGTTIAKVPVNKLRSNVHKYGGFEGLKYSIVAIKGKKKKGKKIIDVNKLVGIPLMYKNVDDETKINYIKESEGLEEVKIIKEILKNQLIEINGGLFYVTSPTEIVNARQLILDFNCTRIIDGIYKAMKYKNYSELSQEEIMNVYDIFVEKLKLYYPTYKNIATNFENMREQFENISDEEKCEVIRQMLVVMHAGPQNGNITFDDFKLSNRLGRLNCKTISLDTTVFIADSPTGMYSKKYKL

SEQ ID NO: 348 - protein, 1368 aa, Lactobacillus curvatus
MSRPYNIGLDIGTSSIGWSVVDDQSKLVSVRGKYGYGVRLYDEGQTAAERRSFRTTRRRLKRRKWRLGLLREIFEPYITPVDDTFFLRKKQSNLSPKDQRKLYPQTSLFNDRTDRAFYDDYPTIYHLRYKLMTEKRQFDIREIYLAMHHIVKYRGHFLNEAPVSSFKSSEINLVAHFDRLNTIFADLFSESGFQLETDKLAEVKALLLDNHQSASNRQRQALLLIYTPSTNKAVEKQNKAIATELLKAILGLKAKFNVLTGIEAEDVKTWTLTFNAENFDEEMVKLESSLDDNAHQIIESLQELYSGVLLAGIVPENQSLSQAMITKYDDHQKHLKMLKAVREALAPEDRQRLKQAYDQYVDGQENTKAYSKEDFYGDITKALKNNPDHPIVSEIKKLIELDQFMPKQRTKDNGAIPHQLHQQELDRIIENQQQYYPWLAELNPNSKRQTVAKYKLDELVAFRVPYYVGPLITAEQQQQSSDAKFAWMIRKAEGQITPWNFDDKVDRQASANEFIKRMTTTDTYLLAEDVLPKQSLIYQRFEVLNELNGLKIDDQPITTELKQAIFTDLFMQKTSVTVKNIQDYLVSEKRYASRPAITGLSDENKFNSRLSTYHDLKTIVGDAVDDVDKQADLEKCIEWSTIFEDGKIYSAKLNEIDWLTDQQRVQLAAKRYRGWGRLSAKLLTQIVNANGQRIMDLLWDTTDNFMRIVHSEDFDKLITEANQMMLAENDVQDVINDLYTSPQNKKALRQILLVVNDIQKAMKGQAPERILIEFAREDEVNPRLSVQRKRQVEQVYQNISNELLNNTEIRNELKDLSNSALSNTRLFLYFMQGGRDMYTGDSLNIDRLSTYDIDHILPQSFIKDNSLDNRVLVSQRMNRSKADQVPTDFTSVELGQKMQIQWEQMLRAGLITKKKYDNLTLNPDHISKYAMKGFINRQLVETRQVIKLATNLLMEQYGEDNIELITVKSGLTHQMRTEFDFPKNRNLNNHHHAFDAYLTAFVGLYLLKRYPKLKPYFVYGEYQKASQQDKWRNFNFLNGLKKDELVDENTEAVIWNKESGLAYLNKIYQFKKILVTREVHENSGALFNQTLYAAKDDKASGQGGKQLIPAKQDRPTALYGGYSGKTVAYMCIVRIKNKKGDLYKVCGVETSWLAQLKQLTDEDSKKAFLKQKISPQFTKVKKQKGTIVKVVEDFEVIAPHILINQRFFDNGQELTLGSATYKHNEQELILDKTAVKLLNGALPLTQSEELAEQVYDEILDQVMHYFPLYDTNQFRAKLSAGKAAFMKLPWKSQWDGNKMVQVGQQVILDRVLIGLHANAAVSDLGVLKISTPLGKMQQPSGISLSPDTQIIYQSPTGLFERRVALRDL

SEQ ID NO: 349 - protein, 1371 aa, Streptococcus gallolyticus
MTEKNYSIGLDIGTNSVGWAVITDDYKVPAKKMKVLGNTDKKYIKKNLLGALLFDNGETAEATRLKRTARRRYTRRKNRLRYLQEIFAEEMAKVDESFFYRLDESFLTTDDKDFERHPIFGNKADEIKYHQEFPTIYHLRKHLADSHEKADLRLIYLALAHMIKFRGHFLIEGELNAENTDVQKLFEAFVEVYDRTFDDSNLSEITVDASSILTEKFSKSRRLENLIKHYPTEKKNTLFGNLVALALGLQPNFKTSFKLSEDAKLQFSKDTYEEDLEELIGKIGDEYADLFTSAKNLYDAILLSGILTVADNTTKAPLSASMIKRYNEHQVDLKKLKEFIKNNASDKYDEIFNDKDKNGYAGYIENGVKQDEFYKYLKTTLSKIDGSDYFLDKIEREDFLRKQRTFDNGSIPHQIHLQEMHAILRRQGEHYAFLKENQAKIEKILTFRIPYYVGPLARKNSRFAWAEYHSDEKITPWNFDEIIDKEKSAEKFITRMTLNDLYLPEEKVLPKHSLVYETYTVYNELTKVKYVNEQGKSNFFDANMKQEIFEHVFKENRKVTKDKFLNYLNKEFPEYRIQDLIGLDKENKSFNASLGTYHDLKKILDKSFLDDKTNETIIEDIIQTLTLFEDRDMIRQRLQKYSDIFTPQQLKKLERRHYTGWGRLSYKLINGIRNKENGKSILDYLIDDGYANRNFMQLISDDTLPFKQIIKDAQIIGDIDDVTSVVRELPGSPAIKKGILQSVKIVDELVKVMGHNPDNIVIEMARENQTTNRGRNQSQQRLKKLQDSLKELGSNILNEEKPSYIEGKVENNHLQDDRLFLYYIQNGKDMYTGDELDIDHLSDYDIDHIIPQAFIKDDSIDNRVLTSSAKNRGKSDDVPSLDIVHDRKADWIRLYKSGLISKRKFDNLTKAERGGLTENDKAGFIKRQLVETRQITKHVAQILDSRFNTERDENDKVIRNVKVITLKSNLVSQFRKDFKFYKVREINDYHHAHDAYLNAVVGTALLKKYPKLAPEFVYGEYKKYDIRKFITSSGDKATAKYFFYSNLMNFFKRVIRYSNGKVVVRPVIECSKDTGEIAWNKQTDFEKVRRVLSYPQVNIVKKVETQTGGFSKESILPKGNSDKLIPRKTKKFRWDTPKYGGFDSPNIAYSVFVIADVEKGKAKKLKTVKELVGISIMERSSFEENPVVFLEKKGYQNVQEDNLIKLPKYSLFEFEGGRRRLLASASELQKGNEVVLSRHLVELLYHAHRVNSFNNSEHLKYVSEHKKEFGEVLSCVENFAKSYVDVEKNLGKIRAVADKIDTFSIEDISISFVNLLTLTALGAPADFNFLGEKIPRKRYTSTKECLNATLIHQSITGLYETRIDLSKLGEE

SEQ ID NO: 350 - protein, 1336 aa, Enterococcus hirae
MTKDYTIGLDIGTNSVGWAVLTDDYQLMKRKMSVHGNTEKKKIKKNFWGARLFDEGQTAEFRRTKRTNRRRLARRKYRLSKLQDLFAEELCKQDDCFFVRLEESFLVPEEKQYKPASIFPTLEEEKEYYQKYPTIYHLRQKLVDSTEKEDLRLVYLALAHLLKYRGHFLFEGDLDTENTSIEESFRVFLEQYGKQSDQPLIVHQPVLTILTDKLSKTKKVEEILKYYPTEKINSFFAQCLKLIVGNQANFKRIFDLEAEVKLQFSKETYEEDLESLLEKIGDEYLDIFLQAKKVHDAILLSEIISSTVKHTQAKLSSGMVERYERHKADLAKFKQFVKENVPQKATVFFKDTTKNGYAGYIKGKTTQEEFYKFVKKELSGVVGSEPFLEKIDQETFLLKQRTYTNGVIPHQVHLIELKAIIDQQKQHYPFLEEAGPKIIALFKFRIPYYVGPLAKEQEASSFAWIERKTAEKINPWNFSEVVDIEKSAMRFIQRMTKQDTYLPTEKVLPKNSLLYQKYMIFNELTKVSYKDERGVKQYFSGDEKQQIFKQLFQKERGKITVKKLQNFLYTHYHIENAQIFGIEKAFNASYSTYHDFMKLAKTNQKAMQEWLEQPEMEPIFEDIVKILTIFEDRQMIKHQLSKYQEVFGEKLLKEFARKHYTGWGRFSAKLIHGIRDRKTNKTILDYLINDDDVPANRNRNLMQLINDEHLSFKEEIAKATVFSKHKSLVDVIQDLPGSPAIKKGIWQSLKIVEELIAIIGYKPKNIVIEMARENQKTHRTKPRLKALENGLKQIGSTLLKEQPTDNKALQKERLYLYYLQNGRDMYTGEPLEIENLHQYEVDHIIPRSFIVDNSIDNKVLVASKQNQKKRDDVPNKQIVNEQRIFWNQLKEAKLISPKKYAYLTKIELTPEDKARFIQRQLVETRQITKHVANILHQSFNQEEEGTDCDGVQIITLKATLTSQFRQTFGLYKVREINPHHHAHDAYLNGFIANVLLKRYPKLAPEFVYGKYVKYSLARENKATAKKEFYSNILKFLESDEPFCDENGEIYWEKSHHLPRIKKVLSSHQVNVVKKVEQQKGGFYKETVNSKEKPDKLIERKNNWDVTKYGGFGSPVIAYAIAFVYAKGKTQKKTRAIEGITIMEQAAFEKDPTTFLKDKGFPHVTEFIKLPKYTLFEFDNGRRRFLASHKESQKGNPFILSDQLVTLLYHAQHYDKITYQESFDYVNTHLSDFSAILTEVLAFAEKYTLADKNIERIQELYEENKYGEISMIAQSFLQLLQFNAIGAPADFKFFGVTIPRKRYTSLTEIWDATIIYQSVTGLYETRIRMGDLWAGEQ

SEQ ID NO: 351 - protein, 1336 aa, Enterococcus faecium
MTKDYTIGLDIGTNSVGWAVLTDDYQLMKRKMSVHGNTEKKKIKKNFWGARLFDEGQTAEFRRTKRTNRRRLARRKYRLSKLQDLFAEELCKQDDCFFVRLEESFLVPEEKQYKPASIFPTLEEEKEYYQKYPTIYHLRQKLVDSTEKEDLRLVYLALAHLLKYRGHFLFEGDLDTENTSIEESFRVFLEQYSKQSDQPLIVHQPVLTILTDKLSKTKKVEEILKYYPTEKINSFFAQCLKLIVGNQANFKRIFDLEAEVKLQFSKETYEEDLESLLEKIGDEYLDIFLQAKKVHDAILLSEIISSTVKHTKAKLSSGMVERYERHKADLAKFKQFVKENVPQKATVFFKDTTKNGYAGYIKGKTTQEEFYKFVKKELSGVVGSEPFLEKIDQETFLLKQRTYTNGVIPHQVHLIELKAIIDQQKQHYPFLEEAGPKIIALFKFRIPYYVGPLAKEQEASSFAWIERKTAEKINPWNFSEVVDIEKSAMRFIQRMTKQDTYLPTEKVLPKNSLLYQKYMIFNELTKVSYKDERGVKQYFSGDEKQQIFKQLFQKERGKITVKKLQNFLYTHYHIENAQIFGIEKAFNASYSTYHDFMKLAKTNQKAMQEWLEQPEMEPIFEDIVKILTIFEDRQMIKHQLSKYQEVFGEKLLKEFARKHYTGWGRFSAKLIHGIRDRKTNKTILDYLINDDDVPANRNRNLMQLINDEHLSFKEEIAKATVFSKHKSLVDVIQDLPGSPAIKKGIWQSLKIVEELIAIIGYKPKNIVIEMARENQKTHRTSPRLKALENGLKQIGSTLLKEQPTDNKALQKERLYLYYLQNGRDMYTGEPLEIENLHQYEVDHIIPRSFIVDNSIDDKVLVASKQNQKKRDDVPKKQIVNEQRIFWNQLKEAKLISTKKYAYLTKIELTPEDKARFIQRQLVETRQITKHVANILHQSFNQEEEGTDCDGVQIITLKATLTSQFRQTFGLYKVREINPHHHAHDAYLNGFIANVLLKRYPKLAPEFVYGKYVKYSLARENKATAKKEFYSNILKFLESDEPFCDENGEIYWEKSHHLPRIKKVLSSHQVNVVKKVEQQKGGFYKETVNSKEKPDKLIERKNNWDVTKYGGFGSPVIAYAIAFVYAKGKTQKKTRAIEGITIMEQAAFEKDPTTFLKEKGFPQVTEFIKLPKYTLFEFDNGRRRFLASHKESQKGNPFILSDQLVTLLYHAQHYDKITYQESFDYVNTHLSDFSAILTEVLAFAEKYTLADKNIERIQELYEENKYGETSMIAQSFLQLLQFNAIGAPADFKFFGVTIPRKRYTSLTEIWDATIIYQSVTGLYETRIRMGDLWAGEQ

SEQ ID NO: 352 - protein, 1336 aa, Enterococcus hirae
MTKDYTIGLDIGTNSVGWAVLTDDYQLMKRKMSVHGNTEKKKIKKNFWGARLFDEGQTAEFRRTKRTNRRRLARRKYRLSKLQDLFAEELCKQDDCFFVRLEESFLVPEEKQYKPASIFPTLEEEKEYYQKYPTIYHLRQKLVDSTEKEDLRLVYLALAHLLKYRGHFLFEGDLDTENTSIEESFRVFLEQYSKQSDQPLIVHQPVLTILTDKLSKTKKVEEILKYYPTEKINSFFAQCLKLIVGNQANFKRIFDLEAEVKLQFSKETYEEDLESLLEKIGDEYLDIFLQAKKVHDAILLSEIISSTVKHTKAKLSSGMVERYERHKADLAKFKQFVKENVPQKATVFFKDTTKNGYAGYIKGKTTQEEFYKFVKKELSGVVGSEPFLEKIDQETFLLKQRTYTNGVIPHQVHLIELKAIIDQQKQHYPFLEEAGPKIIALFKFRIPYYVGPLAKEQEASSFAWIERKTAEKINPWNFSEVVDIEKSAMRFIQRMTKQDTYLPTEKVLPKNSLLYQKYMIFNELTKVSYKDERGVKQYFSGDEKQQIFKQLFQKERGKITVKKLQNFLYTHYHIENAQIFGIEKAFNASYSTYHDFMKLAKTNQKAMQEWLEQPEMEPIFEDIVKILTIFEDRQMIKHQLSKYQEVFGEKLLKEFARKHYTGWGRFSAKLIHGIRDRKTNKTILDYLINDDDVPANRNRNLMQLINDEHLSFKEEIAKATVFSKHKSLVDVIQDLPGSPAIKKGIWQSLKIVEELIAIIGYKPKNIVIEMARENQKTHRTSPRLKALENGLKQIGSTLLKEQPTDNKALQKERLYLYYLQNGRDMYTGEPLEIENLHQYEVDHIIPRSFIVDNSIDNKVLVASKQNQKKRDDVPKKQIVNEQRIFWNQLKEAKLISPKKYAYLTKIELTPEDKARFIQRQLVETRQITKHVANILHQSFNQEEEGTDCDGVQIITLKATLTSQFRQTFGLYKVREINPHHHAHDAYLNGFIANVLLKRYPKLAPEFVYGKYVKYSLARENKATAKKEFYSNILKFLESDEPFCDENGEIYWEKSHHLPRIKKVLSSHQVNVVKKVEQQKGGFYKETVNSKEKPDKLIERKNNWDVTKYGGFGSPVIAYAIAFVYAKGKTQKKTRAIEGITIMEQAAFEKDPTTFLKEKGFPQVTEFIKLPKYTLFEFDNGRRRFLASHKESQKGNPFILSDQLVTLLYHAQHYDKITYQESFDYVNTHLSDFSAILTEVLAFAEKYTLADKNIERIQELYEENKYGETSMIAQSFLQLLQFNAIGAPADFKFFGVTIPRKRYTSLTEIWDATIIYQSVTGLYETRIRMGDLWAGEQ

SEQ ID NO: 353 - protein, 1336 aa, Enterococcus hirae
MTKDYTIGLDIGTNSVGWAVLTDDYQLMKRKMSVHGNTEKKKIKKNFWGARLFDEGQTAEFRRTKRTNRRRLARRKYRLSKLQDLFAEELCKQDDCFFVRLEESFLVPEEKQYKPASIFPTLEEEKEYYQKYPTIYHLRQKLVDSTEKGDLRLVYLALAHLLKYRGHFLFEGDLDTENTSIEESFRVFLEQYGKQSDQPLIVHQPVLTILTDKLSKTKKVEEILKYYPTEKINSFFAQCLKLIVGNQANFKRIFDLEAEVKLQFSKETYEEDLESLLEKIGDEYLDIFLQAKKVHDAILLSEIISSTVKHTQAKLSSGMVERYERHKADLAKFKQFVKENVPQKATVFFKDTTKNGYAGYIKGKTTQEEFYKFVKKELSGVVGSEPFLEKIDQETFLLKQRTYTNGVIPHQVHLIELKAIIDQQKQHYPFLEEAGPKIIALFKFRIPYYVGPLAKEQEASSFAWIERKTAEKINPWNFSEVVDIEKSAMRFIQRMTKQDTYLPTEKVLPKNSLFYQKYMIFNELTKVSYKDERGVKQYFSGDEKQQIFKQLFQKERGKITVKKLQNFLYTHYHIENAQIFGIEKAFNASYSTYHDFMKLAKTNQKAMQEWLEQPEMEPIFEDIVKILTIFEDRQMIKHQLSKYQEVFGEKLLKEFARKHYTGWGRFSAKLIHGIRDRKTNKTILDYLINDDDVPANRNRNLMQLINDEHLSFKEEIAKATVFSKHKSLVDVIQDLPGSPAIKKGIWQSLKIVEELIAIIGYKPKNIVIEMARENQKTHRTKPRLKALENGLKQIGSTLLKEQPTDNKALQKERLYLYYLQNGRDMYTGEPLEIENLHQYEVDHIIPRSFIVDNSIDNKVLVASKQNQKKRDDVPKKQIVNEQRIFWNQLKEAKLISPKKYAYLTKIELTPEDKARFIQRQLVETRQITKHVANILHQSFNQEEEGTDCDGVQIITLKATLTSQFRQTFGLYKVREINPHHHAHDAYLNGFIANVLLKRYPKLAPEFVYGKYVKYSLARENKATAKKEFYSNILKFLESDEPFCDENGEIYWEKSHHLPRIKKVLSSHQVNVVKKVEQQKGGFYKETVNSKEKPDKLIERKNNWDVTKYGGFGSPVIAYAIAFVYAKGKTQKKTKAIEGITIMEQAAFEKDPTTFLKDKGFPQVTEFIKLPKYTLFEFDNGRRRFLASHKESQKGNPFILSDQLVTLLYHAQHYDKITYQESFDYVNTHLSDFSAILTEVLAFAEKYTLADKNIERIQELYEENKYGEISMIAQSFLQLLQFNAIGAPADFKFFGVTIPRKRYTSLTEIWDATIIYQSVTGLYETRIRMGDLWAGEQ

SEQ ID NO: 354 - protein, 1372 aa, Streptococcus gallolyticus
MTKKNYSIGLDIGTNSVGWAVITDDYKVPAKKMKVLGNTDKKYIKKNLLGALLFDSGETAEATRLKRTARRRYTRRKNRLRYLQEIFANEIAKVDESFFQRLDESFLTDDDKTFDSHPIFGNKAEEDAYHQKFPTIYHLRKHLADSSEKADLRLVYLALAHMIKFRGHFLIEGELNAENTDVQKIFADFVGVYNRTFDDSHLSEITVDVASILTEKISKSRRLENLIKYYPTEKKNTLFGNLIALALGLQPNFKTNFKLSEDAKLQFSKDTYEEDLEELLGKIGDDYADLFTSAKNLYDAILLSGILTVDDNSTKAPLSASMIKRYVEHHEDLEKLKEFIKANKSELYHDIFKDKNKNGYAGYIENGVKQDEFYKYLKNILSKIKIDGSDYFLDKIEREDFLRKQRTFDNGSIPHQIHLQEMHAILRRQGDYYPFLKEKQDRIEKILTFRIPYYVGPLVRKDSRFAWAEYRSDEKITPWNFDKVIDKEKSAEKFITRMTLNDLYLPEEKVLPKHSHVYETYAVYNELTKIKYVNEQGKESFFDSNMKQEIFDHVFKENRKVTKEKLLNYLNKEFPEYRIKDLIGLDKENKSFNASLGTYHDLKKILDKAFLDDKVNEEVIEDIIKTLTLFEDKDMIHERLQKYSDIFTANQLKKLERRHYTGWGRLSYKLINGIRNKENNKTILDYLIDDGSANRNFMQLINDDTLPFKQIIQKSQVVGDVDDIEAVVHDLPGSPAIKKGILQSVKIVDELVKVMGGNPDNIVIEMARENQTTNRGRSQSQQRLKKLQNSLKELGSNILNEEKPSYIEDKVENSHLQNDQLFLYYIQNGKDMYTGDELDIDHLSDYDIDHIIPQAFIKDDSIDNRVLTSSAKNRGKSDDVPSLDIVRARKAEWVRLYKSGLISKRKFDNLTKAERGGLTEADKAGFIKRQLVETRQITKHVAQILDARFNTEHDENDKVIRDVKVITLKSNLVSQFRKDFEFYKVREINDYHHAHDAYLNAVVGTALLKKYPKLASEFVYGEYKKYDIRKFITNSSDKATAKYFFYSNLMNFFKTKVKYADGTVFERPIIETNADGEIAWNKQIDFEKVRKVLSYPQVNIVKKVETQTGGFSKESILPKGDSDKLIPRKTKKVYWDTKKYGGFDSPTVAYSVFVVADVEKGKAKKLKTVKELVGISIMERSFFEENPVEFLENKGYHNIREDKLIKLPKYSLFEFEGGRRRLLASASELQKGNEMVLPGYLVELLYHAHRADNFNSTEYLNYVSEHKKEFEKVLSCVEDFANLYVDVEKNLSKIRAVADSMDNFSIEEISNSFINLLTLTALGAPADFNFLGEKIPRKRYTSTKECLNATLIHQSITGLYETRIDLSKLGEE

SEQ ID NO: 355 - protein, 1377 aa, Streptococcus caballi
MTKKNYSIGLDIGTNSVGWAVITDDYKVPAKKMKVLGNTDKKYIKKNLLGALLFDSGETAEATRLKRTARRRYTRRKNRLRYLQDIFTEEMAKVDDSFFQRLDESFLTDNDKNFDSHPIFGNKAEEDAYHQKFPTIYHLRKHLADSTEKADLRLVYLALAHMIKFRGHFLIEGELNAENTDVQKLFTDFVGVYDRTFDDSHLSEITVDAASILTEKISKSRRLENLINNYPKEKKNTLFGNLIALALGLQPNFKTNFKLSEDAKLQFSKDTYEEDLEELLGKIGDDYADLFTSSKNLYDAILLSGILTVDDNSTKAPLSASMIKRYVEHHEDLEKLKEFIKANKSELYHDIFKDKTQNGYAGYIENGVKQDEFYKYLKGILTKINGSDYFLDKIEREDFLRKQRTFDNGSIPHQIHLQEMHAILRRQGDYYPFLKENQEEIEKILTFRIPYYVGPLARKDSRFAWAEYRSDEKITPWNFDKVIDKEKSAEKFITRMTLNDLYLPEEKVLPKHSHVYETFAVYNELTKVKYVNEQGKDSFFDSNMKQEIFDHVFKENRKVTKEKLLNYLDKEFPEYRIQDLVGLDKENKSFNASLGTYHDLKKILDKSFLDDKVNEEVIEDIIKTLTLFEDREMIQQRLQKYSDIFTKQQLKKLERRHYTGWGRLSYKLINGIRNKENNKTILDYLIDDGSANRNFMQLINDDALSFKQIIQEAQVVGDVDDIETVVHDLPGSPAIKKGILQSVKIVDELIKVMGDNPDNIVIEMARENQTTNRGRSQSQQRLKKLQNSLKELGSNILNEEKPSYIEDKVENSHLQNDQLFLYYIQNGKDMYTGDELDIDHLSDYDIDHIIPQAFIKDDSIDNRVLTSSAKNRGKSDDVPSLGIVRARKAEWVRLYKSGLISKRKFDNLTKAERGGLTEADKAGFIKRQLVETRQITKHVAQILDARFNTERDENDKVIRDVKVITLKSNLVSQFRKEFKFYKVREINDYHHAHDAYLNAVVGTALLKKYPKLAPEFVYGEYKKYDVRKLVAKSSDDHSEMGKATAKYFFYSNLMNFFKRVIRYSNGKVIVRPVVEYSKDTGEIAWNKRTDFEKVRKVLSYPQVNIVKKVETQTGGFSKESILPKGDSDKLIPRKTKKVLWEPKKYGGFDSPTVAYSVLVVADVEKGKTKKLKTVKELVGISIMERSFFEKNPVEFLKNKGYQNVQEDKLMKLPKYSLFEFEGGRRRLLASATELQKGNEIMLSAHLVALLYHAHRIGNFNSAEHLKYVSEHKKEFEEVLSCVENFANVYVDVEKNLSKIRAAADSMDNFSIEEISDSFINLLTLTALGAPADFNFLGEKIPRKRYNSTKECLNATLIHQSITGLYETRIDLSKLGEE

SEQ ID NO: 356 - protein, 1373 aa, Unknown
  Streptococcus-multispecies
MTKKNYSIGLDIGTNSVGWAVITDDYKVPAKKMKVLGNTDKKYIKKNLLGALLFDSGETAEATRLKRTARRRYTRRKNRLRYLQEIFAEEMTKVDESFFQRLDESFLRWDDDNKKLGRYPIFGNKADVVKYHQEFPTIYHLRKHLADSSEKADLRLVYLALAHMIKFRGHFLIEGELNAENTDVQKIFADFVGVYDRTFDDSHLSEITVDAASILTEKISKSRRLENLIKYYPTEKKNTLFGNLIALALGLQPNFKMNFKLSEDAKLQFSKDSYEEDLGELLGKIGDDYADLFTSAKNLYDAILLSGILIVDDNSTKAPLSASMIKRYVEHQEDLEKLKEFIKANKSELYHDIFKDKNKNGYAGYIENGVKQDEFYKYLKNTLSKIAGSDYFLDKIEREDFLRKQRTFDNGSIPHQIHLQEMHAILRRQGDYYPFLKENQDRIEKILTFRIPYYVGPLARKDSRFSWAEYHSDEKITPWNFDKVIDKEKSAEKFITRMTLNDLYLPEEKVLPKHSHVYETYAVYNELTKIKYVNEQGKDSFFDSNMKQEIFDHVFKENRKVTKEKLLNYLNKEFPEYRIKDLIGLDKENKSFNASLGTYHDLKKILDKAFLDDKVNEEVIEDIIKTLTLFEDKDMIHERLQKYSDIFTADQLKKLERRHYTGWGRLSYKLINGIRNKENNKTILDYLIDDGSANRNFMQLINDDTLPFKQIIQKSQVVGDVDDIEAVVHDLPGSPAIKKGILQSVKIVDELVKVMGDNPDNIVIEMARENQTTNRGRSQSQQRLKKLQNSLKELGSNILNEEKPSYIEDKVENSHLQNDQLFLYYIQNGKDMYTGDELDIDHLSDYDIDHIIPQAFIKDDSIDNRVLTSSAKNRGKSDDVPSLDIVRARKAEWVRLYKSGLISKRKFDNLTKAERGGLTEADKAGFIKRQLVETRQITKHVAQILDARFNTESDENDKVIRDVKVITLKSNLVSQFRKDFEFYKVREINDYHHAHDAYLNAVVGTALLKKYPKLASEFVYGEYKKYDIRKFITNSSDKATAKYFFYSNLMNFFKRVIRYSNGKVIVRPVVEYSKDTEDIAWDKKSNFRTICKVLSYPQVNIVKKVETQTGGFSKESILPKGDSDKLIPRKTKKAYWDTKKYGGFDSPTVAYSVFVVADVEKGKAKKLKTVKELVGISIMERSFFEENPVEFLENKGYHNIREDKLIKLPKYSLFEFEGGKRRLLASASELQKGNEMVIPGHLVKLLYHAQRINSFNSTKYLDYVSAHKKEFEKVLSCVEDFANLYVDVEKNLSKIRAVADSMDNFSIEEISNSFINLLTLTALGAPADFNFLGEKIPRKRYTSTKECLNATLIHQSITGLYETRIDLSKIGEE

SEQ ID NO: 357 - protein, 1370 aa, Streptococcus gallolyticus
MTKKNYSIGLDIGTNSVGWAVITDDYKVPAKKMKVLGNTDKKYIKKNLLGALLFDSGETAEATRLKRTARRRYTRRKNRLRYLQEIFAEEMTKVDESFFYRLDESFLTTDEKDFERHPIFGNKAEEDAYHQKFPTIYHLRNYLADSSEKADLRLVYLALAHMIKYRGHFLIEGKLNAENTDVQKLFTDFVGVYDRTFDDSHLSEITVDVASTLTEKISKSRRLENLIKYYPTEKKNTLFGNLIALALGLQPNFKMNFKLSEDAKLQFSKDTYEEDLEELLGKIGDDYADLFTSAKNLYDAILLSGILTVDDNSTKAPLSASMIKRYVEHHEDLEKLKEFIKANKSELYHDIFKDKNKNGYAGYIENGVKQDEFYKYLKNTLSKIDGSDYFLDKIEREDFLRKQRTFDNGSIPHQIHLQEMHAILRRQGDYYPFLKEKQDRIEKILTFRIPYYVGPLVRKDSRFAWAEYRSDEKITPWNFDKVIDKEKSAEKFITRMTLNDLYLPEEKVLPKHSHVYETYAVYNELTKIKYVNEQGKESFFDSNMKQEIFDHVFKENRKVTKEKLLNYLNKEFPEYRIKDLIGLDKENKSFNASLGTYHDLKKILDKAFLDDKVNEEVIEDIIKTLTLFEDKDMIHERLQKYSDIFTANQLKKLERRHYTGWGRLSYKLINGIRNKENNKTILDYLIDDGSANRNFMQLINDDTLPFKQIIQKSQVVGDVDDIEAVVHDLPGSPAIKKGILQSVKIVDELVKVMGDNPDNIVIEMARENQTTNRGRSQSQQRLKKLQSSLKELGSNILNEEKPSYIEDKVENSHLQNDQLFLYYIQNGKDMYTGDELDIDHLSDYDIDHIIPQAFIKDDSIDNRVLTSSAKNRGKSDDVPSLDIVRARKAEWVRLYKSGLISKRKFDNLTKAERGGLTEADKAGFIKRQLVETRQITKHVAQILDARFNTEHDENDKVIRDVKVITLKSNLVSQFRKDFEFYKVREINDYHHAHDAYLNAVVGTALLKKYPKLASEFVYGEYKKYDIRKFITNSSDKATAKYFFYSNLMNFFKTKVKYADGTVFERPIIETNADGEIAWNKQIDFEKVRKVLSYPQVNIVKKVETQTGGFSKESILPKGDSDKLIPRKTKKVYWDTKKYGGFDSPTVAYSVFVVADVEKGKAKKLKTVKELVGISIMERSFFEENPVEFLENKGYHNIREDKLIKLPKYSLFEFEGGRRRLLASASELQKGNEMVLPGYLVELLYHAHRADNFNSTEYLNYVSEHKKEFEKVLSCVEDFANLYVDVEKNLSKIRAVADSMDNFSIEEISNSFINLLTLTALGAPADFNFLGEKIPRKRYTSTKECLTATLIHQSITGLYETRIDLSKLGEE

SEQ ID NO: 358 - protein, 1372 aa, Streptococcus gallolyticus; identical to SEQ ID NO: 354

SEQ ID NO: 359 - protein, 1365 aa, Streptococcus constellatus
MTQKYSIGLDIGTNSVGWAIVTDDYKVPAKKMKILGNTNKQYIKKNLLGALLFDSGETAKATRLKRTARRRYTRRKNRLRYLQEIFIEEMNKVDENFFQRLDDSFLVTEDKRGSKYPIFGTLKEEKEYYKEFETIYHLRKRLADSTGKVDLRLVYLALAHMIKFRGHFLIEGQLKAENTDVQTLFNDFVEVYDKTIEESHLAEITVDALSILTEKVSKSRRLENLVKCYPTEKKNTLFGNLIALSLGLQPNFKTNFQLSEDAKLQFSKDTYEEDLEELLGKIGDDYADLFTSAKNLYDTILLSGILAVDDNSTKALLSASMIKRYEEHQKDLKKLKDFIKVNAPAQYDDIFKDETKNGYAGYIENGVKQDEFYKYLKNTLSKIDGSGYFLDKIEREDFLRKQRTFDNGSIPHQIHLQEMHAILRRQGEHYPFLKENQDKIEKILTFRIPYYVGPLVRKGSRFAWAEYKADEKITPWNFDDILDKEKSAEKFITRMTLNDLYLPEEKVLPKHSLLYEIFTVYNELTKVKYVNEQGEAKFFDANMKQEIFDHVFKENPKVTKDKLLNYLDKEFDEFRIVDLTGLDKENKAFNASLGTYHDLRKILDKSFLDDKANEKTIEDIIQTLTLFEDREMIRQRLQKYSDIFTKAQLKKLERRHYTGWGRLSYKLINGIRNKENNKTILEYLVDDGYANRNFMQLINDDTLPFKQIIKDAQAIDDVDDIELIVHDLPGSPAIKKGILQSIKIVDELVKVMGYNPDNIVIEMARENQTTTKGRRNSQQRLKLLQDSLTNLDNPVSIKNVENQQLQNDRLFLYYIQNGKDMYTGEELDIHHLSDYDIDHIIPQAFIKDDSIDNRVLTSSAKNRGKSDNVPNLEVVCDRKADWIRLREAGLISQRKFDNLTKAERGGLTENDKAGFIHRQLVETRQITKHVAQILDARFNPKRDDNKKVIRDVKIITLKSNLVSQFRRDFKLYKVREINDYHHAHDAYLNAVVGTALLKKYPKLTSEFVYGEYKKYDVRKFIAKSDNDEIGKATAKYFFYSNLMNFFKTEVKFADGTVVERPDIETSEDGEIAWNKQTDFKIVRKVLSYPQVNIVKKVEKQTGRFSKESILPKGDSDKLIARKTKENYWDTKKYGGFDSPTVAYSVLVVADIKKGKAKKLKTVKELVGISIMERPFFEKNPIMFLESKGYRNIQKDKLIKLPKYSLFEFEGGRRRLLASAVELQKGNEMVLPQYLNNLLYHAHRIDNSDNSEHLKYITEHKEEFGKLLSYIENFAKSYVDVDKNLEKIQLAVEKIDSFSVKEISNSFIHLLTLTALGAPADFNFLGEKIPRKRYTSTKECLNATLIHQSITGLYETQTDLSKLGED

SEQ ID NO: 360 - protein, 1368 aa, Streptococcus phocae
MVEKKSYSIGLDIGTNSVGWAVITDDYKVPAKKMKVLGNTSRQSIKKNMIGALLFDEGGPAASTRVKRTTRRRYTRRKNRLCYLRDIFESEMHTIDKHFFLRLEDSFLHKSDKRYEAHPIFGTLQEEKAYHDNYPTIYHLRKALADNTEKADLRLIYLALAHIIKFRGHFLIEGALSANNTDVQQLVHALVDAYNIMFEEDQLDIEAIDVKAILTEKISKTRRLENLISNIPGQKKNGLFGNLIALSLGLTPNFKSHFNLPEDAKLQLAKDTYDEELNNLLTQIGDEYADLFLSAKNLSDAILLSDILTVNGDGTQAPLSASLIKRYEEHRQDLALLKQMFKEQLPDLYRDVFTDENKDGYAGYISGKTSQEAFYKYIKPILETLDGAEDFLTKINREDFLRKQRTFDNGSIPHQIHLGELQAILERQQAYYPFLKDNQEKIEKILTFRIPYYIGPLARGNSRFAWLTRTSDQKITPWNFDEMVDQEASAQAFIERMTNFDEYLPQEKVLPKHSLTYEYFTVYNELTKVKYVTEGMTKPEFLSAGQKEQIVELLFKKYRKVTVKQLKEDFFSKIECFDTVDISGVEDKFNASLGTYHDLLKIIKDKAFLDNSENENIIEDIILTLTLFEDKEMIANRLAVYEDLFDQNVLKQLKRRHYTGWGRLSKQLINGMRDKHTGKTILDFLKADGFINRNFMQLINDDNLSFKEEIKKAQEGGLKDSINDQIRDLAGSPAIKKGILQTINIVDEIVKIMGKAPQHIVVEMARDVQKTDIGVKQSRERMKRVQEVLKKLGSQLLKEHPVENFQLQNERLYLYYLQNGKDMYTGEELSISNLSHYDIDHIIPRSFIKDDSIDNKVLTRSEHNRGKTDNVPSIEVVKRMKPYWQKLLDTKVISQRKFDNLTKAERGGLQESDKANFIQRQLVETRQITKHVAQILDSRFNTERDEKDRPIRRVKVITLKSKFVSDFRQDFGFYKLREINDYHHAHDAYLNAVVGTALLKMYPKLASEFVYGDYQKYDLKRMVGKSGKASGHATAKYFFYSNLMNFFKSEVKLANGNIIKRSPIEVNEETGEIVWDKTKDFGTVRKVLSAPQVNIVKKTEIQTGGFSNETILSKGKSSKLIPRKNKWRDTTKYGGFNTPTVAYSVLVVAKVEKGKAKKLKPVKELVGITIMERTKFEANPIAFLESKGYHDIQEHLMITLPKYSLFELENGRRRLLASATELQKGNEMVLPQHLVTFLYRVSKRDKGTQSENMEYISNHKEKFIEIFHYIIRYAEKNVIKPKVIERLNDTFNQKFNDSDLTELSISFLNLFKFTSFGAPEKFTFLNSEIKQDDVRYRSTKECLNSTLIHQSVTGLYETRIDLSQFGGD

SEQ ID NO: 361 - protein, 1300 aa, Brochothrix thermosphacta
MWGVSLFEAGKTAAERRGYRSTRRRLNHRKFRLRLLEDMFEKEILSKDPSFFIRLKEAFLSPKDEQKQFKGNILFNDKDYTDADYYEQYKTIYHLRYDLISQHRQFDIREVYLAIHHLIKYRGHFIYEDQTFTTDGNQLQHHIKAIITMINSTLNRIIIPETIDINVFEKILLDRMMNRSSKVKFLIELTGEDKQDKPLLKELFNLIVGLKAKPASIFEQENLATIVETMNMSTEQVQLDLLTLADVLADEEYDLLLTAQKIYSAIILDESMDGYEYFAEAKKESYRKHQEELVLVKKMLKSNAITNDERAKFEYFYTDYIGAKSSNYEESKNIKKGLSAAYGKYSKEERLFKHIELLLAKENVLTTVEHALLEKNITFASLLPLQRSSRNAVIPYQVHEKELVAILENQATYYPFLLEQKDNIHKLLTFRIPYYVGPLADQKDSEFAWMVRKQAGKITPFNFEEMVDIDASSEAFIKRMTNKCTYLIHEDVIPKHSFSYAKFEVLNELNKIRLDGKPIDIPLKKRIFEGLFLEKTKVTQTSLKKWLAEHEHMTVSVVQGTQKETEFATSLQAFHRFVKIFDRETVSNPANEEMFEKIIYWSTVFEDKKIMRRKLSEYPQLTEQQQVQLAQVRFRGWGRLSQRLINRIKTPVSGDEDHKLSINEILWQTNENFMQIIRNKDYLFKKIIEEQFENETALLNKQRIDELAASPANKKGIWQAIKIVKELEKVLQQPAENIFIEFARSDEESKRSTPRDKFIEKAYAQLKKETDTFNLEHLKELKQRSKQLSSQRLFLYFIQNGKCMYSGEHLDIERLDSYEVDHILPQSYIKDNSIENLALVKKVENQRKKDSLLLNSSIINQNYSRWEQLKNAGLIGEKKFRNLTRTKITDRDKEGFIARQLVETRQITKHVTQLLQQEYKDTTKVFAIKATLVSGLRRKFEFIKNRNVNDYHHAQDAFLVAFLGTNITSNYPKIEMEYLFKGYQHYLNEVGKSAAKPKFTFIVENLSKQQYNSTTGEVKWNPEVDIAKLKRILNFKQCNIVRKVEEQSGALFKETIYPVEESSSKTIPLKKHLDTAIYGGYTAVNYASYALIQFKKGRKLKREIIGIPLAVQTRIDNSETSLQAYIAEQIKSEVEILNGRILKYQLISNNGNRLYIAGPSERHNARQLIVSDEAAKVIWLISTKQADEAMFLKYYRLEHLEAVFEELIRKQAADYQIFEKLIKKIEVNKVYFYSCTYNEKVKVIEELLKITQANATNGDLKLLKMSNREGRLGSVSVALDFKIINQSVTGLYQSIEDYNN

SEQ ID NO: 362 - protein, 1193 aa, Streptococcus pyogenes
PDNSDVDKLFIQLVQTYNQLFEENPINASGVDAKAILSARLSKSRRLENLIAQLPGEKKNGLFGNLIALSLGLTPNFKSNFDLAEDAKLQLSKDTYDDDLDNLLAQIGDQYADLFLAAKNLSDAILLSDILRVNTEITKAPLSASMIKRYDEHHQDLTLLKALVRQQLPEKYKEIFFDQSKNGYAGYIDGGASQEEFYKFIKPILEKMDGTEELLVKLNREDLLRKQRTFDNGSIPHQIHLGELHAILRRQEDFYPFLKDNREKIEKILTFRIPYYVGPLARGNSRFAWMTRKSEETITPWNFEEVVDKGASAQSFIERMTNFDKNLPNEKVLPKHSLLYEYFTVYNELTKVKYVTEGMRKPAFLSGEQKKAIVDLLFKTNRKVTVKQLKEDYFKKIECFDSVEISGVEDRFNASLGTYHDLLKIIKDKDFLDNEENEDILEDIVLTLTLFEDREMIEERLKTYAHLFDDKVMKQLKRRRYTGWGRLSRKLINGIRDKQSGKTILDFLKSDGFANRNFMQLIHDDSLTFKEDIQKAQVSGQGDSLHEHIANLAGSPAIKKGILQTVKVVDELVKVMGRHKPENIVIEMARENQTTQKGQKNSRERMKRIEEGIKELGSQILKEHPVENTQLQNEKLYLYYLQNGRDMYVDQELDINRLSDYDVDHIVPQSFLKDDSIDNKVLTRSDKNRGKSDNVPSEEVVKKMKNYWRQLLNAKLITQRKFDNLTKAERGGLSELDKAGFIKRQLVETRQITKHVAQILDSRMNTKYDENDKLIREVKVITLKSKLVSDFRKDFQFYKVREINNYHHAHDAYLNAVVGTALIKKYPKLESEFVYGDYKVYDVRKMIAKSEQEIGKATAKYFFYSNIMNFFKTEITLANGEIRKRPLIETNGETGEIVWDKGRDFATVRKVLSMPQVNIVKKTEVQTGGFSKESILPKRNSDKLIARKKDWDPKKYGGFDSPTVAYSVLVVAKVEKGKSKKLKSVKELLGITIMERSSFEKNPIDFLEAKGYKEVKKDLIIKLPKYSLFELENGRKRMLASAGELQKGNELALPSKYVNFLYLASHYEKLKGSPEDNEQKQLFVEQHKHYLDEIIEQISEFSKRVILADANLDKVLSAYNKHRDKPIREQAENIIHLFTLTNLGAPAAFKYFDTTIDRKRYTSTKEVLDATLIHQSITGLYETRIDLSQLGGD

SEQ ID NO: 363 - protein, 1417 aa, Artificial Sequence
  Synthetic
MDYKDDDDKDYKDDDDKMAPKKKRKVGIHGVPAADKKYSIGLDIGTNSVGWAVITDEYKVPSKKFKVLGNTDRHSIKKNLIGALLFDSGETAEATRLKRTARRRYTRRKNRICYLQEIFSNEMAKVDDSFFHRLEESFLVEEDKKHERHPIFGNIVDEVAYHEKYPTIYHLRKKLVDSTDKADLRLIYLALAHMIKFRGHFLIEGDLNPDNSDVDKLFIQLVQTYNQLFEENPINASGVDAKAILSARLSKSRRLENLIAQLPGEKKNGLFGNLIALSLGLTPNFKSNFDLAEDAKLQLSKDTYDDDLDNLLAQIGDQYADLFLAAKNLSDAILLSDILRVNTEITKAPLSASMIKRYDEHHQDLTLLKALVRQQLPEKYKEIFFDQSKNGYAGYIDGGASQEEFYKFIKPILEKMDGTEELLVKLNREDLLRKQRTFDNGSIPHQIHLGELHAILRRQEDFYPFLKDNREKIEKILTFRIPYYVGPLARGNSRFAWMTRKSEETITPWNFEEVVDKGASAQSFIERMTNFDKNLPNEKVLPKHSLLYEYFTVYNELTKVKYVTEGMRKPAFLSGEQKKAIVDLLFKTNRKVTVKQLKEDYFKKIECFDSVEISGVEDRFNASLGTYHDLLKIIKDKDFLDNEENEDILEDIVLTLTLFEDREMIEERLKTYAHLFDDKVMKQLKRRRYTGWGRLSRKLINGIRDKQSGKTILDFLKSDGFANRNFMQLIHDDSLTFKEDIQKAQVSGQGDSLHEHIANLAGSPAIKKGILQTVKVVDELVKVMGRHKPENIVIEMARENQTTQKGQKNSRERMKRIEEGIKELGSQILKEHPVENTQLQNEKLYLYYLQNGRDMYVDQELDINRLSDYDVDHIVPQSFLKDDSIDNKVLTRSDKNRGKSDNVPSEEVVKKMKNYWRQLLNAKLITQRKFDNLTKAERGGLSELDKAGFIKRQLVETRQITKHVAQILDSRMNTKYDENDKLIREVKVITLKSKLVSDFRKDFQFYKVREINNYHHAHDAYLNAVVGTALIKKYPKLESEFVYGDYKVYDVRKMIAKSEQEIGKATAKYFFYSNIMNFFKTEITLANGEIRKRPLIETNGETGEIVWDKGRDFATVRKVLSMPQVNIVKKTEVQTGGFSKESILPKRNSDKLIARKKDWDPKKYGGFDSPTVAYSVLVVAKVEKGKSKKLKSVKELLGITIMERSSFEKNPIDFLEAKGYKEVKKDLIIKLPKYSLFELENGRKRMLASAGELQKGNELALPSKYVNFLYLASHYEKLKGSPEDNEQKQLFVEQHKHYLDEIIEQISEFSKRVILADANLDKVLSAYNKHRDKPIREQAENIIHLFTLTNLGAPAAFKYFDTTIDRKRYTSTKEVLDATLIHQSITGLYETRIDLSQLGGDKRPAATKKAGQAKKKK

SEQ ID NO: 364 - protein, 1389 aa, Artificial Sequence
  Synthetic
MDKKYSIGLDIGTNSVGWAVITDEYKVPSKKFKVLGNTDRHSIKKNLIGALLFDSGETAEATRLKRTARRRYTRRKNRICYLQEIFSNEMAKVDDSFFHRLEESFLVEEDKKHERHPIFGNIVDEVAYHEKYPTIYHLRKKLVDSTDKADLRLIYLALAHMIKFRGHFLIEGDLNPDNSDVDKLFIQLVQTYNQLFEENPINASGVDAKAILSARLSKSRRLENLIAQLPGEKKNGLFGNLIALSLGLTPNFKSNFDLAEDAKLQLSKDTYDDDLDNLLAQIGDQYADLFLAAKNLSDAILLSDILRVNTEITKAPLSASMIKRYDEHHQDLTLLKALVRQQLPEKYKEIFFDQSKNGYAGYIDGGASQEEFYKFIKPILEKMDGTEELLVKLNREDLLRKQRTFDNGSIPHQIHLGELHAILRRQEDFYPFLKDNREKIEKILTFRIPYYVGPLARGNSRFAWMTRKSEETITPWNFEEVVDKGASAQSFIERMTNFDKNLPNEKVLPKHSLLYEYFTVYNELTKVKYVTEGMRKPAFLSGEQKKAIVDLLFKTNRKVTVKQLKEDYFKKIECFDSVEISGVEDRFNASLGTYHDLLKIIKDKDFLDNEENEDILEDIVLTLTLFEDREMIEERLKTYAHLFDDKVMKQLKRRRYTGWGRLSRKLINGIRDKQSGKTILDFLKSDGFANRNFMQLIHDDSLTFKEDIQKAQVSGQGDSLHEHIANLAGSPAIKKGILQTVKVVDELVKVMGRHKPENIVIEMARENQTTQKGQKNSRERMKRIEEGIKELGSQILKEHPVENTQLQNEKLYLYYLQNGRDMYVDQELDINRLSDYDVDHIVPQSFLKDDSIDNKVLTRSDKNRGKSDNVPSEEVVKKMKNYWRQLLNAKLITQRKFDNLTKAERGGLSELDKAGFIKRQLVETRQITKHVAQILDSRMNTKYDENDKLIREVKVITLKSKLVSDFRKDFQFYKVREINNYHHAHDAYLNAVVGTALIKKYPKLESEFVYGDYKVYDVRKMIAKSEQEIGKATAKYFFYSNIMNFFKTEITLANGEIRKRPLIETNGETGEIVWDKGRDFATVRKVLSMPQVNIVKKTEVQTGGFSKESILPKRNSDKLIARKKDWDPKKYGGFDSPTVAYSVLVVAKVEKGKSKKLKSVKELLGITIMERSSFEKNPIDFLEAKGYKEVKKDLIIKLPKYSLFELENGRKRMLASAGELQKGNELALPSKYVNFLYLASHYEKLKGSPEDNEQKQLFVEQHKHYLDEIIEQISEFSKRVILADANLDKVLSAYNKHRDKPIREQAENIIHLFTLTNLGAPAAFKYFDTTIDRKRYTSTKEVLDATLIHQSITGLYETRIDLSQLGGDGGSGPPKKKRKVYPYDVPDYA

SEQ ID NO: 365 - protein, 1361 aa, Unknown
  Streptococcus sp. FF10
MKKPYSIGLDIGTNSVGWSVVTDDYKVPAKKMKVLGNTDKEYIKKNLIGALLFDSGETAEATRMKRTARRRYTRRRNRILYLQDIFSPELNQVDESFLHRLDDSFLVAEDKRGERHVIFGNIADEVKYHKEFPTIYHLRKHLADSSEKADLRLVYLALAHIIKYRGHFLIDEPIDIRNMNSQNLFKEFLLAFDGIQVDCYLASKHTDISGIITAKISKSRKVEAVLEQFPDQKKNSFFGNMVSLVFGLMPNFKSNFELDEDAKLQFSRDSYDEDLENLLGIIGDEYADVFVAAKKVYDSILLSGILTTNNHSTKAPLSASMIDRYDEHNSDKKLLRDFIRTNIGKEVFKEVFYDTSKNGYAGYIDGKTNQEDFYKYLKNLLQKVDGGDYFIEKIEREDFLRKQRTFDNGSIPHQVHLDEMKAILRRQGEFYPFLKENAEKIQQILTFKIPYYVGPLARGNSRFAWASYNSNEKMTPWNFDNVIDKTSSAQAFIERMTNNDLYLPDQKVLPKHSLLYQKFAVYNELTKIKYVTETGEARLFDVFLKKEIFDGLFKKERKVTKKKILNFLDKNFDEFRITDIQGLDNETGNFNASYGTYHDLLKIIGDKEFMDSSDNVDVLEDIVLSLTLFEDREMIKQRLLKYEDIFSKKVIANLTRRHYTGWGRLSAKLINGIKDKHSRKTILDYLIDDGHSNRNFMQLINDDNLSFKDEIANSQVIGDGDDLHQVVQELAGSPAIKKGILQSLKIVDELVKVMGYNPEQIVVEMARENQTTARGRNNSQQRLGSLTKAIQDFGSDILKRYPVENNQLQNDQLYLYYLQNGKDMYTGDTLDIHNLSQYDIDHIIPQSFIKDNSLDNRVLTNSKSNRGKSDNVPSNEVVKRMKGFWLKQLDAKLISQRKFDNLTKAERGGLSAEDKAGFIKRQLVETRQITKHVARILDERFNRDFDKNDKRIRNVKIVTLKSNLVSNFRKEFGFYKVREINNFHHAHDAYLNAVVAKALLIRYPKLEPEFVYGEYPKYNSYRERKSATEKMFFYSNIMNMFKTTIKLADGRVVEKPVIEANEETGEIAWDKTKHFANVKKVLSYPQVSIVKKVEEQTGGFSKESILPKGGSDKLIARKTKNNYLSTQKYGGFDSPTVAYSIMFVADIEKGKSKRLKTVKEMIGITIMERSRFESNSVTFLEEKGYRNIRENTIIKFPKYSLFELENGRRRLLASAIELQKGNEMFLPQQFVNLLYHAQHANKEDSVIYLEKHRHELSELFHHIIGVSEKTILKPKVEMTLNEAFEKHFEFDEVSELAQSFISLLKFTAFGAPGGFKFLDADIKQSNLRYQTVTEVLSSTLIHQSVTGLYETRIDLSKLGGE

SEQ ID NO: 366 - protein, 1337 aa, Listeria monocytogenes
MKNMKNPYTIGLDIGTNSVGWAVLTNQYDLVKRKMKVAGNSDKKQIKKNFWGVRLFDDGQTAVDRRMNRTARRRIERRRNRISYLQEIFAVEMANIDANFFCRLNDSFYVDSEKRNSRHPFFATIEEEVAYHKNYRTIYHLREELVNSSEKADLRLVYLALAHIIKYRGNFLIEGALDTKNTSVDGVYEQFIQTYNQVFMSNIEEGTLAKVEENIEVANILAGKFTRREKFERILQLYPGEKSTGMFAQFISLIVGSKGNFQKVFDLIEKTDIECAKDSYEEDLEALLAIIGDEYAELFVAAKNTYNAVVLSSIITVTATETNAKLSASMIERFDAHEKDLGELKAFIKLHLPKQYQEIFNNAAIDGYAGYIDGKTKQVDFYKYLKTILENIEGADYFIAKIEEENFLRKQRTFDNGAIPHQLHLEELEAIIHQQAKYYPFLREDYEKIKSLVTFRIPYFVGPLAKGQSEFAWLTRKADGEIRPWNIEEKVDFGKSAVDFIEKMTNKDTYLPKENVLPKHSLCYQKYMVYNELTKVRYIDDQGKTNYFSGQEKQQIFNDLFKQKRKVKKKDLELFLRNINHIESPTIEGLEDSFNASYATYHDLLKVGMKQEILDNPLNTEMLEDIVKILTVFEDKPMIKEQLQQFSDVLDGGVLKKLERRHYTGWGRLSAKLLVGIREKQSHLTILDYLMNDDGLNRNLMQLINDSNLSFKSIIEKEQVSTTDKDLQSIVADLAGSPAIKKGILQSLKIVDELVSIMGYPPQTIVVEMARENQTTGKGKNNSKPRYKSLEKAIKEFGSKILKEHPTDNQELKNNRLYLYYLQNGKDMYTGQELDIHNLSNYDIDHIVPQSFITDNSIDNLVLTSSAGNREKGGDVPPLEIVRKRKVFWEKLYQGNLMSKRKFDYLTKAERGGLTDADKARFIHRQLVETRQITKNVANILHQRFNNETDNHGNTMEQVRIVTLKSALVSQFRKQFQLYKVREVNDYHHAHDAYLNGVVANTLLKVYPQLEPEFVYGEYHQFDWFKANKATAKKQFYTNIMLFFGQKERIIDENGEILWDKKYLETIKKVLDYRQMNIVKKTEIQKGEFSKATIKPKGNSSKLIPRKENWDPMKYGGLDSPNMAYAVIIEHAKGKKKLIFEKKIIRITIMERKMFEKDEEAFLEEKGYRHPKVLTKLPKYTLYECEKGRRRMLASANEAQKGNQLVLSNHLVSLLYHAKNCEASDGKSLKYIEAHRETFSELLAQVSEFATRYTLADANLSKINNLFEQNKEGDIQAIAQSFVDLMAFNAMGAPASFKFFEATIDRKRYTNLKELLSSTIIYQSITGLYESRKRLDD

SEQ ID NO: 367 - protein, 1337 aa, Listeria monocytogenes
MKNMKNPYTIGLDIGTNSVGWAVLTNQYDLVKRKMKVAGNSDKKQIKKNFWGVRLFDDGQTAVDRRMNRTARRRIERRRNRISYLQEIFAVEMANIDANFFCRLNDSFYVDSEKRNSRHPFFATIEEEVAYHKNYRTIYHLREELVNSSEKADLRLVYLALAHIIKYRGNFLIEGALDTKNTSVDGVYEQFIQTYNQVFMSNIEEGTLAKVEENIEVANILARKFTRREKFERILQLYPGEKSTGMFAQFISLIVGSKGNFQKVFDLIEKTDIECAKDSYEEDLETLLAIIGDEYAELFVAAKNTYNAVVLSSIITVTDTETNAKLSASMIERFDAHEKDLVELKAFIKLNLPKQYEEIFSNAAIDGYAGYIDGKTKQVDFYKYLKTILENIEGADYFIAKIEEENFLRKQRTFDNGAIPHQLHLEELEAIIHQQAKYYPFLREDYEKIKSLVTFRIPYFVGPLAKGQSEFAWLTRKADGEIRPWNIEEKVDFGKSAVDFIEKMTNKDTYLPKENVLPKHSLCYQKYMVYNELTKIRYIDDQGKTNYFSGQEKQQIFNDLFKQKRKVKKKDLELFLRNINHVESPTIEGLEDSFNASYATYHDLMKVGIKQEILDNPLNTEMLEDIVKILTVFEDKRMIKEQLQQFSDVLDGTVLKKLERRHYTGWGRLSAKLLVGIRDKQSHLTILDYLMNDDGLNRNLMQLINDSNLSFKSIIEKEQVSTADKDLQSIVADLAGSPAIKKGILQSLKVVEELVSVMGYPPQTIVVEMARENQTTNKGKNNSKPRYKSLEKAIKEFGSQILKEHPTDNQELKNNRLYLYYLQNGKDMYTGQELDIHNLSNYDIDHIVPQSFITDNSIDNLVLTSSAGNREKGDNVPPLEIVQKRKIFWEKLYQGNLMSKRKFDYLTKAERGGLTEADKARFIHRQLVETRQITKNVANILHQRFNYKTDDNEDTMEPVRIVTLKSALVSQFRKQFQLYKVREVNDYHHAHDAYLNGVVANTLLKVYPQLEPEFVYGEYHQFDWFKANKATAKKQFYTNIMLFFAQKERIIDENGEILWDKKYLETIKKVLNYRQMNIVKKTEIQKGEFSNQNPKPRGDSSKLIPKKTNLNPIKYGGFEGSNMAYAIIIEHEKRKKKVTIEKKLIQINIMERKAFEKDEKVFLEGKGYHQPKVLTKLPKYALYECENGRRRMLGSANEVHKGNQMLLPNHLMTLLYHAEKREAIDGESLAYIEAHKAVFGELLAHISEFARKYTLANDKLDEINMLYERNKDGDVKSIAESFVSLKKFNAFGVHKDFNFFGTTIKRKRDRKLKELLNSTIIYQSITGLYESRKRLDS

SEQ ID NO: 368 - protein, 1370 aa, Streptococcus agalactiae
MNKPYSIGLDIGTNSVGWSIITDDYKVPAKKMRVLGNTDKEYIKKNLIGALLFDGGNTAADRRLKRIARRRYTRRRNRILYLQEIFAEKMSKVDDSFFHRLEDSFLVEEDKRGSKYPIFATLQEEKDYHEKFPTIYHLRKELADKKEKADLRLVYLALAHIIKFRGHFLIEDDRFDVRNTDIQKQYQAFLEIFDTTFENNHLLSQNVDVEAILTDKISKSAKKDRILAQYPDQKSTGIFAEFLKLIVGNQADFKKHFNLEDKTPLQFAKDSYDEDLENLLGQIGDEFADLFSAAKKLYDSVLLSGILTVTDLSTKAPLSASMIQRYDEHREDLKQLKQFVKASLPEKYQEIFADSSKDGYAGYIEGKTNQEAFYKYLSKLLTKQEGSEYLLEKIKNEDFLRKQRTFDNGSIPHQVHLTELRAIIRRQSEYYPFLKENLDRIEKILTFRIPYYVGPLAREKSDFAWMTRKTDDSIRPWNFEELVDKEASAEAFIHCMTNNDLYLPEEKVLPKHSLIYEKFTVYNELTKVRYKNEQGETYFFDSNIKQEIFDGVFKEYRKVSKKQLLDFLAKEFEEFRIVDVTGLDKENKAFNASLGTYHDLEKILGKDFLDNPDNESILEDIVQTLTLFEDREMIKKRLDIYKDFFTESQLKKLYRRHYTGWGRLSAKLINGIRNKENQKTILDYLIDDGSANRNFMQLIKDAGLSFKSIISKAQSGSHSDNLKEVVSELAGSPAIKKGILQSLKIVDELVKVMGYKPEQIVVEMARENQTTNQGRRNSRQRYKLLDDGVRNLASDLNGNILKEYPTDNQALQNERLFLYYLQNGRDMYTEKALDIDNLSQYDIDHIIPQAFIKDDSIDNRVLVSSAKNRGKSDDVPSLEIVKDCKVFWKKLLDAKLMSQRKYDNLTKAERGGLTSDDKARFIQRQLVETRQITKHVARILDERFNNELDSKGRRIRKVKIVTLKSNLVSNFRKEFGFYKIREVNDYHHAHDAYLNAVVAKAILTKYPQLEPEFVYGDYPKYNSYKTRKSATEKLFFYSNIMNFFKTKVTLADGTVVVKDDIEVNNDTGEIVWDKKKHFATVRKVLSYPQNNIVKKTEIQTGGFSKESILAHGNSDKLIPRKTKDIYLDPKKYGGFDSPIVAYSVLVVADIKKGKAQKLKTVTELLGITIMERSRFEKNPSAFLESKGYLNIRTDKLIILPKYSLFELENGRRRLLASAGELQKGNELALPTQFMKFLYLASRYNESKGKPEEIEKKQEFVNQHVSYFDDILQIINDFSNRVILADANLEKINKLYQDNKENISVDELANNIINLFTFTSLGAPAAFKFFDKIVDRKRYTSTKEVLNSTLIHQSITGLYETRIDLGKLGED

SEQ ID NO: 369 - protein, 1370 aa, Streptococcus agalactiae
MNKPYSIGLDIGTNSVGWSIITDDYKVPAKKMRVLGNTDKEYIKKNLIGALLFDGGNTAADRRLKRTARRRYTRRRNRILYLQEIFAEEMSKVDDSFFHRLEDSFLVEEDKRGSKYPIFATLQEEKDYHEKFSTIYHLRKELADKKEKADLRLIYIALAHIIKFRGHFLIEDDSFDVRNTDISKQYQDFLEIFNTTFENNDLLSQNVDVEAILTDKISKSAKKDRILAQYPNQKSTGIFAEFLKLIVGNQADFKKYFNLEDKTPLQFAKDSYDEDLENLLGQIGDEFADLFSAAKKLYDSVLLSGILTVIDLSTKASLSDSMIQRYDEHREDLKQLKQFVKASLPEKYQEIFADSSKDGYAGYIEGKTNQEAFYKYLSKLLTKQEDSENFLEKIKNEDFLRKQRTFDNGSIPHQVHLTELKAIIRRQSEYYPFLKENQDRIEKILTFRIPYYIGPLAREKSDFAWMTRKTDDSIRPWNFEDLVDKEKSAEAFIHRMTNNDFYLPEEKVLPKHSLIYEKFTVYNELTKVRYKNEQGETYFFDSNIKQEIFDGVFKEHRKVSKKKLLDFLAKEYEEFRIVDVIGLDKENKAFNASLGTYHDLEKILDKDFLDNPDNESILEDIVQTLTLFEDREMIKKRLENYKDLFTESQLKKLYRRHYTGWGRLSAKLINGIRDKESQKTILDYLIDDGRSNRNFMQLINDDGLSFKSIISKAQAGSHSDNLKEVVGELAGSPAIKKGILQSLKIVDELVKVMGYEPEQIVVEMARENQTTNQGRRNSRQRYKLLDDGVKNLASDLNGNILKEYPTDNQALQNERLFLYYLQNGRDMYTGEALDIDNLSQYDIDHIIPQAFIKDDSIDNRVLVSSAKNRGKSDDVPSLEIVKDCKVFWKKLLDAKLMSQRKYDNLTKAERGGLTSDDKARFIQRQLVETRQITKHVARILDERFNNELDSKGRRIRKVKIVTLKSNLVSNFRKEFGFYKIREVNNYHHAHDAYLNAVVAKAILTKYPQLEPEFVYGDYPKYNSYKTRKSATEKLFFYSNIMNFFKTKVTLADGTVVVKDDIEVNNDTGEIVWDKKKHFATVRKVLSYPQNNIVKKTEIQTGGFSKESILAHGNSDKLIPRKTKDIYLDPKKYGGFDSPIVAYSVLVVADIKKGKAQKLKTVTELLGITIMERSRFEKNPSAFLESKGYLNIRADKLIILPKYSLFELENGRRRLLASAGELQKGNELALPTQFMKFLYLASRYNESKGKPEEIEKKQEFVNQHVSYFDDILQLINDFSKRVILADANLEKINKLYQDNKENISVDELANNIINLFTFTSLGAPAAFKFFDKIVDRKRYTSTKEVLNSTLIHQSITGLYETRIDLGKLGED

SEQ ID NO: 370 - protein, 1370 aa, Streptococcus agalactiae
MNKPYSIGLDIGTNSVGWSIITDDYKVPAKKMRVLGNTDKEYIKKNLIGALLFDGGNTAADRRLKRTARRRYTRRRNRILYLQEIFAEEMSKVDDSFFHRLEDSFLVEEDKRGSKYPIFATLQEEKDYHEKFSTIYHLRKELADKKEKADLRLIYIALAHIIKFRGHFLIEDDSFDVRNTDISKQYQDFLEIFNTTFENNDLLSQNVDVEAILTDKISKSAKKDRILAQYPNQKSTGIFAEFLKLIVGNQADFKKYFNLEDKTPLQFAKDSYDEDLENLLGQIGDEFADLFSAAKKLYDSVLLSGILTVIDLSTKAPLSASMIQRYDEHREDLKQLKQFVKASLPEKYQEIFADSSKDGYAGYIEGKTNQEAFYKYLSKLLTKQEDSENFLEKIKNEDFLRKQRTFDNGSIPHQVHLTELKAIIRRQSEYYPFLKENQDRIEKILTFRIPYYIGPLAREKSDFAWMTRKTDDSIRPWNFEDLVDKEKSAEAFIHRMTNNDFYLPEEKVLPKHSLIYEKFTVYNELTKVRYKNEQGETYFFDSNIKQEIFDGVFKEHRKVSKKKLLDFLAKEYEEFRIVDVIGLDKENKAFNASLGTYHDLEKILDKDFLDNPDNESILEDIVQTLTLFEDREMIKKRLENYKDLFTESQLKKLYRRHYTGWGRLSAKLINGIRDKESQKTILDYLIDDGRSNRNFMQLINDDGLSFKSIISKAQAGSHSDNLKEVVGELAGSPAIKKGILQSLKIVDELVKVMGYEPEQIVVEMARENQTTNQGRRNSRQRYKLLDDGVKNLASDLNGNILKEYPTDNQALQNERLFLYYLQNGRDMYTGEALDIDNLSQYDIDHIIPQAFIKDDSIDNRVLVSSAKNRGKSDDVPSLEIVKDCKVFWKKLLDAKLMSQRKYDNLTKAERGGLTSDDKARFIQRQLVEIRQITKHVARILDERFNNELDSKGRRIRKVKIVTLKSNLVSNFRKEFGFYKIREVNNYHHAHDAYLNAVVAKAILTKYPQLEPEFVYGDYPKYNSYKTRKSATEKLFFYSNIMNFFKTKVTLADGTVVVKDDIEVNNDTGEIVWDKKKHFATVRKVLSYPQNNIVKKTEIQTGGFSKESILAHGNSDKLIPRKTKDIYLDPKKYGGFDSPIVAYSVLVVADIKKGKAQKLKTVTELLGITIMERSRFEKNPSAFLESKGYLNIRADKLIILPKYSLFELENGRRRLLASAGELQKGNELALPTQFMKFLYLASRYNESKGKPEEIEKKQEFVNQHVSYFDDILQLINDFSKRVILADANLEKINKLYQDNKENISVDELANNIINLFTFTSLGAPAAFKFFDKIVDRKRYTSTKEVLNSTLIHQSITGLYETRIDLGKLGED

SEQ ID NO: 371 - protein, 1346 aa, Streptococcus anginosus
MMKKEYSIGLDIGTNSVGWAVITDDYKVPAKKMKVLGNTDKQSIKKNLLGALLFDSGETAEATRLKRTARRRYTRRRNRLRYLQEIFAEEMMQVDESFFQRLDDSFLVEEDKRGSRYPIFGNIAAEVKYHDDFPTIYHLRKHLVDISQKADLRLVYLALAHMIKFRGHFLIEGQLKAENTNVQALFKDFVEVYDKTVEESHLSEMTVDALSILTEKVSKSRRLENLVECYPTEKKNTLFGNLIALSLGLQPNFKTNFQLSEDAKLQFSKDTYEEDLEGLLGEIGDEYADLFASAKNLYDAILLSGILAVDDNTTKAPLSASMVKRYEEHQKDLKKLKDFIKVNAPAQYDDIFKDETKNGYAGYIENGVKQDEFYKYLKNTLSKIDGSDYFLDKIDREDFLRKQRTFDNGSIPHQIHLQEMHAILRRQGEHYPFLKENQDKIEKILTFRIPYYVGPLARKGSRFAWAEYKADEKITPWNFDDILDKEKSAEKFITRMTLNDLYLPEEKVLPKHSPLYETFTVYNELTKVKYVNEQGEAKFFDTNMKQEIFDHVFKENRKVTKDKLLNYLNKEFEEFRIVNLTGLDKENKAFNASLGTYHDLRKILDKSFLDDKVNEKIIEDIIQTLTLFEDREMIRQRLQKYSDIFTTQQLKKLERRHYTGWGRLSYKLINGIRNKENKKTILDYLIDDGYANRNFMQLINDDALSFKEEIARAQIIGDVDDIANVVHDLPGSPAIKKGILQSVKIVDELVKVMGHNPANIIIEMARENQTTDKGRRNSQQRLKLLQDSLKNLDNPVNIKNVENQQLQNDRLFLYYIQNGKDMYTGETLDINNLSQYDIDHIIPQAFIKDNSLDNRVLTRSDKNRGKSDDVPSIEVVHEMKSFWSKLLSVKLITQRKFDNLTKAERGGLTEEDKAGFIKRQLVETRQITKHVAQILDERFNTEFDGAQRRIRNVKIITLKSNLVSNFRKEFELYKVREINDYHHAHDAYLNAVVGNALLLKYPQLEPEFVYGEYPKYNSYRSRKSATEKFLFYSNILRFFKKEDIQTNEDGEIAWNKEKHIKILRKVLSYPQVNIVKKTEEQTGGFSKESILPKGESDKLIPRKTKNSYWNPKKYGGFDSPVVAYSILVFADVEKGKSKKLRKVQDMVGITIMEKKRFEKHPVDFLEQRGYRNVRLEKIIKLPKYSLFELENKRRRLLASARELQKGNELVIPQRFTTLLYHSYRIEKDYEPEHREYVEKHKDEFKELLEYISVFSRKYVLADNNLTKIEMLFSKNKDAEVSSLAKSFISLLTFTAFGAPAAFNFFGENIDRKRYTSVTECLNATLIHQSITGLYETRIDLSKLGED

SEQ ID NO: 372 - protein, 782 aa, Listeria monocytogenes
  misc_feature (722)..(722): Xaa can be any naturally occurring amino acid
IFNDLFKQKRKVKKKDLELFLRNINQIESPTIEGLEDSFNASYATYHDLLKVGMKQEILDNPLNTEMLEDIVKILTVFEDKRMIKEQLQQFSDVLDGVVLKKLERRHYTGWGRLSAKLLVGIRDKQSHLTILEYLMNDDGLNRNLMQLINDSNLSFKSIIEKEQVSTTDKDLQSIVADLAGSPAIKKGILQSLKIVDELVSIMGYPPQTIVVEMARENQTTVKGKNNSRPRYKSLEKAIKEFGSQILKEHPTDNQELKNNRLYLYYLQNGKDIYTGQELDIHNLSNYDIDHIVPQSFITDNSIDNLVLTSSAGNREKGDDVPPLEIVRKRKVFWEKLYQGNLMSKRKFDYLTKAERGGLTEADKARFIHRQLVETRQITKNVANILHQRFNNETDNHGNTMEQVRIVTLKSALVSQFRKQFQLYKVREVNDYHHAHDAYLNGVVANTLLKVYPQLEPEFVYGEYHQFDWFKANKATAKKQFYTNIMLFFAQKERIIDENGEILWDKKYLETIKKVLDYRQMNIVKKTEIQKGEFSKATIKPKGNSSKLIPRKENWDPMKYGGLDSPNMAYAVIIEHAKGKKKIVIEKKLIQINIMERKMFEKDEEAFLEEKGYRHPKVLTKLPKYTLYECEKGRRRMLASANEAQKGNQLVLSNHLVSLLYHAKNCEASDGKSLKYTEAHRETFSELLAQVSEFATRYTLADANLSKINNLFEQNKEGDIKXIAQSFVDLMVFNAMGAPASFKFFEATIDRKRYTNLKELLSSTIIYQSITGLYESRKRLDD

SEQ ID NO: 373 - protein, 1366 aa, Streptococcus parasanguinis
MKKPYSIGLDIGTNSVGWAVITDDYKVPAKKMKVLGNTNKESIKKNLIGALLFDAGNTAADRRLKRTARRRYTRRRNRILYLQEIFAAEMNKVDESFFHRLDDSFLVPEDKRGSKYPIFGTLEEEKEYHKQFPTIYYLRKILADSKEKVDLRLIYLALAHIIKYRGHFLYEDSFDIKNNDIQKIFNEFTILYDNTFEESSLSKGNAQVEEIFTDKISKSAKRDRVLKLFPDEKSTGLFSEFLKLIVGNQADFKKHFDLEEKAPLQFSKDTYEEDLESLLGQIGDVYADLFVVAKKLYDAILLAGILSVKDPGTKAPLSASMIERYDNHQNDLSALKQFVRRNLPEKYAEVFSDDSKDGYAGYIDGKTTQEGFYKYIKNLISKIEGAEYFLEKIEREDFLRKQRTFDNGSIPHQIHLQEMNAILRHQGEYYPFLKENKDKIEQILTFRIPYYVGPLARGNSDFAWLSRNSDEAIRPWNFEEMVDKSSSAEDFIHRMTNYDLYLPEEKVLPKHSLLYETFTVYNELTKVKYIAEGMKDYQFLDSGQKKQIVNQLFKEKRKVTEKDIIHYLHNVDGYDGIELKGIEKHFNSSLSTYHDLLKIIKDKEFMDDPKNEEIFENIVHTLTIFEDRVMIKQRLNQYDSIFDEKVIKALTRRHYTGWGKLSAKLINGIRDKKTSKTILDYLIDDGYSNRNFMQLINDDGLSFKETIQKAQVVGETNDVKQVVQELPGSPAIKKGILQSIKIVDELVKVMGHAPESVVIEMARENQTTNKGKSKSQQRLKTLSDAISELGSNILKEHPTDNIQLQNDRLFLYYLQNGKDMYTGEALDINQLSNYDIDHIIPQAFIKDDSLDNRVLTSSKDNRGKSDNVPSLEIVEKMKGFWQQLLDSKLISERKFNNLTKAERGGLDERDKVGFIKRQLVETRQITKHVAQILDDRFNAEVNEKNQKLRSVKIITLKSNLVSNFRKEFGLYKVREINDYHHAHDAYLNAVVAKAILKKYPKLEPEFVYGDYQKYDLKRYISRTKDPKEIEKATEKYFFYSNLLNFFKDKVYYADGTIIQRGNVEYSKDTGEIAWNKKRDFAIVRKVLSYPQVNIVKKTEEQTGGFSKESILPKGNSDKLIPRKTKNVQLDTTKYGGFDSPVIAYSILLVADVEKGKSKKLKTVKSLIGITIMEKVKFEANPVAFLEGKGYQNVVEENIIRLPKYSLFELENGRRRMLASAKELQKGNEMVLPSYLIALLYHAKRIQKKDEPEHLEYIKQHHSEFNDLLNFVSEFSQKYVLAESNLEKIKNLYIDNEQTNMEEIANSFINLLTFTAFGAPAVFKFFGKDIERKRYSTVTEILKATLIHQSLTGLYETRIDLSKLGEE

SEQ ID NO: 374 - protein, 1326 aa, Streptococcus pseudoporcinus
MLGTVLFDSGETAQARRLKRTNRRRYTRRRYRLCQLQNIFATEMVKVDDTFFQRLSESFFYYQDKAFDKHPIFGNSKEERAYHKTYPTIYHLRKDLADRDQKADLRLIYLALSHIIKFRGHFLIEGKLNSENTDVQKLFIALVTVYNLLFEEEPIAGETCDAKALLTAKTSKSKRLESLISEFPGQKKNGLFGNLLALALGLRPNFKSNFGLSEDAKLQITKDTYEEELDNLLAEIGDHYADLFLAAKNLSDAILLSDILTLSDENTRAPLSASMIKRYEEHQEDLALLKKLVKEQMPEKYWEIFSNAKKNGYAGYIEGKVSQEDFYRYIKPILSRLKGGDEFLAKIDRDDFLRKQRTFDNGSIPHQIHLKELHAILRRQEKYYPFLAEQKEKIEQLLCFRIPYYVGPLAKGGNSSFAWLKRRSDEPITPWNFKDVVDEEASAQAFIEGMTNYDTYLPEEKVLPKHSPLYEMFTVYNELTKVKYIAENMTKPLYLSAEQKEAIIDHLFKQTRKVTVKDLKEKYFSQIEGLENVDVTGVEGAFNASLGTYNDLLKIIKDKAFLDDEANAEILEEIVLILTLFQDEKLIEKRLAKYANLFEKSVLKKLRKRHYRGWGRLSRQLIDGMKDKASGKTILDFLKADDFANRNFIQLINDSSLDFEKLIDDAQKKAIKRESLTEAVANLAGSPAIKKGILQSLKVVDEIVKVMGHNPDNIVIEMSRENQTTAQGLKNARQRLKKIKEVHKKTGSRILEDNSERITNLTLQDNRLYLYLLQDGKDMYTGQDLDINNLSQYDIDHIIPQSFIKDNSIDNLVLTTQKANRGKSDNVPSIEVVRDMKDRVWRRQLANGAISRQKFDHLTKAERGGLADSDKARFLRRQLVETRQITKHVAQLLDSRFNSKSNQNKKLARNVKIITLKSKIVSDFRKDFGLYKLREVNNYHHAHDAYLNAVVGTALLKKYPKLEAEFVYGDYKHFDLVKLISKSDPSLGKATAKVFFYSNIMNFFKEELSLADGTLMKRPVIETNTETGEVVWDKVKDFKTIRKVLSYPQVNIVKKTEIQSGAFSKESVLSKGNSDKLIERKKGWDPKKYGGFDSPNTAYSIFVVAKVAKRKAQKLKTVKEIVGITIMEQAEYEKDNIAFLEKKGYQDIQEKLLIKLPKYSLFELENGRRRLLASANEFQKGNELALSGKYMKFLYLASRYDKLSSKIESEQQKKLFVEQHLHYFDEILDIVVKHATCYIKAENNLKKIISLYKKKEAYSINEQALNMLNLFIFTSLGAPSTFVFFDETIDRKRYTTSSDVLNGILIQQSITGLYETRIDLSRFGGD

SEQ ID NO: 375 - protein, 1376 aa, Streptococcus pseudopneumoniae
MSNKPYSIGLDIGTNSVGWAVITDDYKVPSKKMKVLGNTDKHFIKKNLIGALLFDEGTTAEDRRLKRTARRRYTRRKNRLRYLQEIFSEEISKVDNSFFHRLDDSFLVPEDKRGSKYPIFATLTEEKEYYKQFPTIYHLRKQLADSKEKADLRLIYLTLAHMIKYRGHFLYEESFDIKNNDIQKIFNEFISIYDNTFEGSSLSGQNAQVEAIFTDKISKSTKRERVLKLFPDQKSTGLFSEFLKLIVGNQADFKKHFDLEEKAPLQFSKDTYDEDLENLLGQIGDDFADLFLVAKKLYDAILLSGILTVTDPSTKAPLSASMIERYENHQKDLAALKQFIKNNLPEKYDEVFSDQSKEGYAGYIDSKTTQEAFYKYIKNLLSKIDGADYLLDKIEREDFLRKQRTFDNGSIPHQIHLQEMNAILRRQGEHYPFLKENREKIEKILTFRIPYYVGPLARGNRDFAWLTRNSDQAIRPWNFEEIVDKASSAEAFINKMTNYDLYLPEEKVLPKHSLLYETFAVYNELTKVKFIAEGLRDYQFLDSGQKKKIINQLFKEKRKVTEKDLIHYLHNVDGYDGIELKGIEKQFNASLSTYHDLLKIIKDKRFMDEPKNQEILENIVHTLTIFEDREMIKQRLAQYASIFDEKVIKTLTRRHYTGWGKLSAKLINCIRDRKTGKTILDYLIDDGYNNRNFMQLINDDGLSFKEIIQESQVVGKPDDVKQIVQELPGSSAIKKGILQSIKLVDELVKVMGHDPESIVIEMARENQTTARGKKNSQQRYKRIEDSLKILASGLNSNILKEHPTDNIQLQNDRLFLYYLQNGKDMYTGNPLDINHLSSYDIDHIIPQAFIKDDSLDNRVLTSSKDNRGKSDNVPSLEVVQKRKAFWQQLLESKLISERKFNNLTKAERGGLNERDKVGFIKRQLVETRQITKHVAQILDSRFNTKVNEKNQKIRTVKIITLKSNLVSNFRKEFRLYKVREINDYHHAHDAYLNAVVAKAILKKYPKLEPEFVYGDYQKYDLKRYISRSRDPKEIEKATEKYFFYSNLLNFFKEEVHYADGTIVKRENIEYSKDTGEIAWNKEIDFATIRKILSLSQVNIVKKTEEQTVGQNGGLFDNNIVSKKKVVDASKLIPIKSGLSPEKYGGYARPTIAYSVLVIADIEKGKAKKLKRIKEMVGITIQDKKKFEANPTAYLEEYGYKNINPNLIIKLPKYSLFKFNDGQRRLLASSIELQKGNELILPYHFTTLLYHAQRINKISEPIHKQYVETHQSEFEELLTTIISLSKKYIQKPIVESLLQQAFEQADKDIYQLSESFISLLKLTSFGAPGAFRFLGVEISQSNVRYQSVSSCFNATLIHQSITGLYETRIDLSKLGED

SEQ ID NO: 376 - protein, 1378 aa, Streptococcus pseudopneumoniae
MSNKPYSIGLDIGTNSVGWAVITDDYKVPSKKMTVLGNTDKHFIKKNLIGALLFDEGTTAEDRRLKRTARRRYTRRKNRLRYLQEIFSGEMSKVDSSFFHRLDDSFLVPEDKRGSKYPIFATLVEEKEYHKQFPTIYHLRKQLADSKEKADLRLIYLVLAHMIKYRGHFLYEEAFDIKNNDIQKIFNEFISIYDNTFEGSSLSGQNAQVETIFTDKISKSAKRERVLKLFPDEKSTGLFSEFLKLIVGNQADFKKHFDLGEKAPLQFSKDTYDEDLENLLGQIGDDFADLFLVAKKLYDAILLSGILTVTDPSTKAPLSASMIERYENHQKDLTTLKQFIKNNLPEKYDEVFSDQSKDGYAGYIDGKTTQEAFYKYIKNLLSKFEGTDYFLEKIEREDFLRKQRTFDNGSIPHQIHLQEMNAILRRQGEHYPFLKENKEKIEKILTFRIPYYVGPLARGNRDFAWLTRNSDQAIRPWNFEEIVDKASSAEDFINKMTNYDLYLPEEKVLPKHSLLYETFAVYNELTKVKFIAEGLRDYQFLDSGQKKQIVNQLFKEKRKVTEKDIIHYLHTVDGYDGIELKGIEKQFNASLSTYHDLLKIIKDKEFMDDSKNEAILENIVHTLTIFEDREMIKQRLAQYDSLFDKKVIKALTRRHYTGWGKLSAKLINGICDKQTGNTILDYLIDDGEINRNFMQLINDDGLSFKKIIQKSQVVGETDDVKQVVRELPGSPAIKKGILQSIKIVDELVKVMDHAPESIVIEMARENQTTARGKKNSQQRYKRIEDSLKILASGLDSNILKENPTDNNQLQNDRLFLYYLQNGKDMYTGEALDINQLSSYDIDHIIPQAFIKDDSLDNRVLTSSKDNRGKSDNVPSLEVVQKRKAFWQQLLDSKLISERKFNNLTKAERERDGLNELDKVGFIKRQLVETRQITKHVAQILDARFNKEVTEKDKKNRNVKIITLKSNLVSNFRKEFRLYKVREINDYHHAHDAYLNAVVAKAILKKYPKLEPEFVYGDYQKNDLKRYISRSKDPKDIEKATEKYFFYSNLLNFFKEEVHYADGTIVKRENIEYSKDTGEIAWNKEKDFATIKKVLSYPQVNIVKKTEEQTVGQNGGLFDNNIVSKEKVVDASKLIPIKSGLSPEKYGGYARPTIAYSVLVIADIEKGKTKKLKRIKEMVGITIQDKKKFEANPIAYLEECGYKNINPNLIIKLPKYSLFEFNGGQRRLLASSIELQKGNELILPYHFTALLYHAQRINKFSEPIHKQYVEAHQNEFKELLTIIISLSKKYIQKPNVESLLHQAFEQADNDIYQLSESFISLLKLTSFGAPGAFKFLGAEISQSSVRYKPNSQFLDTTLIHQSITGLYETRIDLSKLGED

SEQ ID NO: 377 - protein, 1376 aa, Streptococcus pseudopneumoniae
MSNKPYSIGLDIGTNSVGWVIITDDYKVPSKKMKVLGNTDKHFIKKNLIGALLFDEGTTAEDRRLKRTARRRYTRRKNRLRYLQEIFAEEMNKVDSSFFHRLDDSFLVPEDKRGSKYPIFATLAEEKEYHKNFPTIYHLRKQLADSKEKADLRLIYLALAHMIKYRGHFLYEEAFDIKNNDIQKIFNEFINIYDNTFEGSSLSGQNEQVEAIFSDKISKSAKRERVLKLFPDEKSTGLFSEFLKLIVGNQADFKKHFDLEEKAPLQFSKDTYDEDLENLLGQIGDGFADLFLVAKKLYDAILLSGILTVTDPSTKAPLSASMIERYQNHQNDLASLKQFIKNNLPEKYDEVFSDQSKDGYAGYVDGKTTQEAFYKYIKNLLSKFEGADYFLEKIEREDFLRKQRTFDNGSIPHQIHLQEMNAILRRQGEHYPFLKENKEKIEKILTFRIPYYVGPLARGNRDFAWLTRNSDQAIRPWNFEEIVDKASSAEDFINKMTNYDLYLPEEKVLPKHSLLYETFAVYNELTKVKFIAEGLRDYQFLDSGQKKQIVNQLFKEKRKVTEKDIIQYLHNVDGYDGIELKGIEKQFNASLSTYHDLLKIIKDKEFMDDSKNEEILENIVHTLTIFEDREMIKQRLAQYDSIFDEKVIKALTRRHYTGWGKLSAKLINGIRDKQTGKTILDYLIDDGYSNRNFMQLINDDGLSFKEIIQKAQVFGKTNDVKQVVQELPGSPAIKKGILQSIKIVEELVKVMGHEPESIVIEMARENQTTTRGKKNSQQRYKRIENSLKILASGLNSKILKEHPTDNNQLQNDRLFLYYLQNGKDMYTGEALDINQLSSCDIDHIIPQAFIKDDSLDNRVLTSSKENRGKSDNVPCLEVVDKMKVFWQQLLDFKLISYRKFNNLTKAERGGLDERDKVGFIRRQLVETRQITKHVAQILDSRFNTEVTEKDKKNRNVKIITLKSNLVSNFRKEFGLYKVREINDYHHAHDAYLNAVVAKAILKKYPKLEPEFVYGDYQKYDLKRYISRSKDPKDIEKATEKYFFYSNLLNFFKEEVHYADGTIVKRENIEYSKDTGEIAWNKEKDFATIKKILSLPQVNIVKKTEEQTVGQNGGLFDNNIVSKKKVVDASKLIPIKSGLSPEKYGGYARPTIAYSVLVIADIEKGKTKKLKRIKEMIGITVQDKKIFESNPIAYLEECGYKNINPNLIIKLPKYSLFEFNGGQRRLLASSIELQKGNELILPYHFTALLYHTQRINKISEPIHKQYVEAHQNEFKELLTTIISLSKKYIQKPNVESLLQQAFEQADKDIYQLSESFISLLKLTSFGAPGAFKFLGVEISQSSVRYKPNSQFLDATLIHQSITGLYETRIDLSKLGED

SEQ ID NO: 378 - protein, 1279 aa, Streptococcus pyogenes
MAKVDDSFFHRLEESFLVEEDKKHERHPIFGNIVDEVAYHEKYPTIYHLRKKLVDSTDKADLRLIYLALAHMIKFRGHFLIEGDLNPDNSDVDKLFIQLVQTYNQLFEENPINASGVDAKAILSARLSKSRRLENLIAQLPGEKKNGLFGNLIALSLGLTPNFKSNFDLAEDAKLQLSKDTYDDDLDNLLAQIGDQYADLFLAAKNLSDAILLSDILRVNTEITKAPLSASMIKRYDEHHQDLTLLKALVRQQLPEKYKEIFFDQSKNGYAGYIDGGASQEEFYKFIKPILEKMDGTEELLVKLNREDLLRKQRTFDNGSIPHQIHLGELHAILRRQEDFYPFLKDNREKIEKILTFRIPYYVGPLARGNSRFAWMTRKSEETITPWNFEEVVDKGASAQSFIERMTNFDKNLPNEKVLPKHSLLYEYFTVYNELTKVKYVTEGMRKPAFLSGEQKKAIVDLLFKTNRKVTVKQLKEDYFKKIECFDSVEISGVEDRFNASLGTYHDLLKIIKDKDFLDNEENEDILEDIVLTLTLFEDREMIEERLKTYAHLFDDKVMKQLKRRRYTGWGRLSRKLINGIRDKQSGKTILDFLKSDGFANRNFMQLIHDDSLTFKEDIQKAQVSGQGDSLHEHIANLAGSPAIKKGILQTVKVVDELVKVMGRHKPENIVIEMARENQTTQKGQKNSRERMKRIEEGIKELGSQILKEHPVENTQLQNEKLYLYYLQNGRDMYVDQELDINRLSDYDVDHIVPQSFLKDDSIDNKVLTRSDKNRGKSDNVPSEEVVKKMKNYWRQLLNAKLITQRKFDNLTKAERGGLSELDKAGFIKRQLVETRQITKHVAQILDSRMNTKYDENDKLIREVKVITLKSKLVSDFRKDFQFYKVREINNYHHAHDAYLNAVVGTALIKKYPKLESEFVYGDYKVYDVRKMIAKSEQEIGKATAKYFFYSNIMNFFKTEITLANGEIRKRPLIETNGETGEIVWDKGRDFATVRKVLSMPQVNIVKKTEVQTGGFSKESILPKRNSDKLIARKKDWDPKKYGGFDSPTVAYSVLVVAKVEKGKSKKLKSVKELLGITIMERSSFEKNPIDFLEAKGYKEVKKDLIIKLPKYSLFELENGRKRMLASAGELQKGNELALPSKYVNFLYLASHYEKLKGSPEDNEQKQLFVEQHKHYLDEIIEQISEFSKRVILADANLDKVLSAYNKHRDKPIREQAENIIHLFTLTNLGAPAAFKYFDTTIDRKRYTSTKEVLDATLIHQSITGLYETRIDLSQLGGD

SEQ ID NO: 379 - protein, 1345 aa, Streptococcus mutans
MKKPYSIGLDIGTNSVGWAVVTDDYKVPAKKMKVLGNTDKSHIKKNLLGALLFDSGNTAEDRRLKRTTRRRYTRRRNRILYLQEIFSEEMGKVDDSFFHRLEDSFLVTEDKRGERHPIFGNLEEEVKYHENFPTIYHLRQYLADNPEKTDLRLVYLALAHIIKFRGHFLIEGKFDTRNNDVQRLFQEFLAVYDNTFENSSLQEQNVQVEEILTDKISKSAKKDRVLKLFPNEKSNGRFAEFLKLIVGNQADFKKHFELEEKAPLQFSKDTYEEELEVLLAQIGDNYAELFLSAKKLYDSILLSGILTVTDVSTKAPLSASMIQRYNEHQMDLTQLKQFIRQKLSDKYNEVFSDVSKDGYAGYIDGKTNQEAFYKYLKGLLNKIEGSGYFLDKIEREDFLRKQRTFDNGSIPHQIHLQEMRAIIRRQAEFYPFLADNQDRIEKLLTFRIPYYVGPLASGKSDFAWLSRKSADKITPWNFDEIVDKESSAEAFINRMTNYDLYLPNQKVLPKHSLLYEKFTVYNELTKVKYKTEQGKTAFFDANMKQEIFDGVFKVYRKVTKDKLMDFLEKEFDEFRIVDLTGLDKENKVFNASYGTYHDLCKILDKDFLDNSKNEKILEDIVLTLTLFEDREMIRKRLENYSDLLTKEQVKKLERRHYTGWGRLSAELIHGIRNKESRKTILDYLIDDGNSNRNFMQLINDDALSFKEEIAKAQVIGETDNLNQVVSDIAGSPAIKKGILQSLKIVDELVKIMGHQPENIVVEMARENQFTNQGRRNSQQRLKGLTDSIKEFGSQILKEHPVENSQLQNDRLFLYYLQNGRDMYTGEELDIDYLSQYDIDHIIPQAFIKDNSIDNRVLTSSKENRGKSDDVPSKDVVRKMKSYWSKLLSAKLITQRKFDNLTKAERGGLTDDDKAGFIKRQLVETRQITKHVARILDERFNTETDENNKKIRQVKIVTLKSNLVSNFRKEFELYKVREINDYHHAHDAYLNAVIGKALLGVYPQLEPEFVYGDYPHFHGHKENKATAKKFFYSNIMNFFKKDDVRTDKNGEIIWKKDEHISNIKKVLSYPQVNIVKKVEEQTGGFSKESILPKGNSDKLIPRKTKKFYWDTKKYGGFDSPIVAYSILVIADIEKGKSKKLKTVKALVGVTIMEKMTFERDPVAFLERKGYRNVQEENIIKLPKYSLFKLENGRKRLLASARELQKGNEIVLPNHLGTLLYHAKNIHKVDEPKHLDYVDKHKDEFKELLDVVSNFSKKYTLAEGNLEKIKELYAQNNGEDLKELASSFINLLTFTAIGAPATFKFFDKNIDRKRYTSTTEILKATLIHQSITGLYETRIDLSKLGGD

SEQ ID NO: 380 - protein, 1370 aa, Streptococcus agalactiae
MNKPYSIGLDIGTNSVGWSIITDDYKVPAKKMRVLGNTDKEYIKKNLIGALLFDGGNTAADRRLKRTARRRYTRRRNRILYLQEIFAEEMSKVDDSFFHRLEDSFLVEEDKRGSKYPIFATLQEEKDYHEKFSTIYHLRKELADKKEKADLRLIYIALAHIIKFRGHFLIEDDSFDVRNTDISKQYQDFLEIFNTTFENNDLLSQNVDVEAILTDKISKSAKKDRILAQYPNQKSTGIFAEFLKLIVGNQADFKKYFNLEDKTPLQFAKDSYDEDLENLLGQIGDEFADLFSAAKKLYDSVLLSGILTVIDLSTKAPLSASMIQRYDEHREDLKQLKQFVKASLPEKYQEIFADSSKDGYAGYIEGKTNQEAFYKYLSKLLTKQEDSENFLEKIKNEDFLRKQRTFDNGSIPHQVHLTELKAIIRRQSEYYPFLKENQDRIEKILTFRIPYYIGPLAREKSDFAWMTRKTDDSIRPWNFEDLVDKEKSAEAFIHRMTNNDFYLPEEKVLPKHSLIYEKFTVYNELTKVRYKNEQGETYFFDSNIKQEIFDGVFKEHRKVSKKKLLDFLAKEYEEFRIVDVIGLDKENKAFNASLGTYHDLEKILDKDFLDNPDNESILEDIVQTLTLFEDREMIKKRLENYKDLFTESQLKKLYRRHYTGWGRLSAKLINGIRDKESQKTILDYLIDDGRSNRNFMQLINDDGLSFKSIISKAQAGSHSDNLKEVVGELAGSPAIKKGILQSLKIVDELVKVMGYEPEQIVVEMARENQTTNQGRRNSRQRYKLLDDGVKNLASDLNGNILKEYPTDNQALQNERLFLYYLQNGRDMYTGEALDIDNLSQYDIDHIIPQAFIKDDSIDNRVLVSSAKNRGKSDDVPSLEIVKDCKVFWKKLLDAKLMSQRKYDNLTKAERGGLTSDDKARFIQRQLVETRQITKHVARILDERFNNELDSKGRRIRKVKIVTVKSNLVSNFRKEFGFYKIREVNNYHHAHDAYLNAVVAKAILTKYPQLEPEFVYGDYPKYNSYKTRKSATEKLFFYSNIMNFFKTKVTLADGTVVVKDDIEVNNDTGEIVWDKKKHFATVRKVLSYPQNNIVKKTEIQTGGFSKESILAHGNSDKLIPRKTKDIYLDPKKYGGFDSPIVAYSVLVVADIKKGKAQKLKTVTELLGITIMERSRFEKNPSAFLESKGYLNIRADKLIILPKYSLFELENGRRRLLASAGELQKGNELALPTQFMKFLYLASRYNESKGKPEEIEKKQEFVNQHVSYFDDILQLINDFSKRVILADANLEKINKLYQDNKENISVDELANNIINLFTFTSLGAPAAFKFFDKIVDRKRYTSTKEVLNSTLIHQSITGLYETRIDLGKLGED

SEQ ID NO: 381 - protein, 1370 aa, Streptococcus agalactiae
MNKPYSIGLDIGTNSVGWSIITDDYKVPAKKMRVLGNTDKEYIKKNLIGALLFDGGNTAADRRLKRTARRRYTRRRNRILYLQEIFAEEMSKVDDSFFHRLEDSFLVEEDKRGSKYPIFATLQEEKDYHEKFSTIYHLRKELADKKEKADLRLIYIALAHIIKFRGHFLIEDDSFDVRNTDISKQYQDFLEIFNTTFENNDLLSQNVDVEAILTDKISKSAKKDRILAQYPNQKSTGIFAEFLKLIVGNQADFKKYFNLEDKTPLQFAKDSYDEDLENLLGQIGDEFADLFSAAKKLYDSVLLSGILTVIDLSTKAPLSASMIQRYDEHREDLKQLKQFVKASLPEKYQEIFADSSKDGYAGYIEGKTNQEAFYKYLSKLLTKQEDSENFLEKIKNEDFLRKQRTFDNGSIPHQVHLTELKAIIRRQSEYYPFLKENQDRIEKILTFRIPYYIGPLAREKSDFAWMTRKTDDSIRPWNFEDLVDKEKSAEAFIHRMTNNDFYLPEEKVLPKHSLIYEKFTVYNELTKVRYKNEQGETYFFDSNIKQEIFDGVFKEHRKVSKKKLLDFLAKEYEEFRIVDVIGLDKENKAFNASLGTYHDLEKILDKDFLDNPDNESILEDIVQTLTLFEDREMIKKRLENYKDLFTESQLKKLYRRHYTGWGRLSAKLINGIRDKESQKTILDYLIDDGRSNRNFMQLINDDGLSFKSIISKAQAGSHSDNLKEVVGELAGSPAIKKGILQSLKIVDELVKVMGYEPEQIVVEMARENQTTNQGRRNSRQRYKLLDDGVKNLASDLNGNILKEYPTDNQALQNERLFLYYLQNGRDMYTGEALDIDNLSQYDIDHIIPQAFIKDDSIDNRVLVSSAKNRGKSDDVPSLEIVKDCKVFWKKLLDAKLMSQRKYDNLTKAERGGLTSDDKARFIQRQLVETRQITKHVARILDELFNNELDSKGRRIRKVKIVTLKSNLVSNFRKEFGFYKIREVNNYHHAHDAYLNAVVAKAILTKYPQLEPEFVYGDYPKYNSYKTRKSATEKLFFYSNIMNFFKTKVTLADGTVVVKDDIEVNNDTGEIVWDKKKHFATVRKVLSYPQNNIVKKTEIQTGGFSKESILAHGNSDKLIPRKTKDIYLDPKKYGGFDSPIVAYSVLVVADIKKGKAQKLKTVTELLGITIMERSRFEKNPSAFLESKGYLNIRADKLIILPKYSLFELENGRRRLLASAGELQKGNELALPTQFMKFLYLASRYNESKGKPEEIEKKQEFVNQHVSYFDDILQLINDFSKRVILADANLEKINKLYQDNKENISVDELANNIINLFTFTSLGAPAAFKFFDKIVDRKRYTSTKEVLNSTLIHQSITGLYETRIDLGKLGGD

SEQ ID NO: 382 - protein, 1384 aa, Streptococcus agalactiae
MNKPYSIGLDIGTNSVGWSIITDDYKVPAKKMRVLGNTDKEYIKKNLIGALLFDGGNTAADRRLKRTARRRYTRRRNRILYLQEIFAEEMSKVDDSFFHRLEDSFLVEEDKRGSKYPIFATLQEEKDYHEKFSTIYHLRKELADKKEKADLRLIYIALAHIIKFRGHFLIEDDSFDVRNTDISKQYQDFLEIFNTTFENNDLLSQNVDVEAILTDKISKSAKKDRILAQYPNQKSTGIFAEFLKLIVGNQADFKKYFNLEDKTPLQFAKDSYDEDLENLLGQIGDEFADLFSAAKKLYDSVLLSGILTVIDLSTKAPLSASMIQRYDEHREDLKQLKQFVKASLPEKYQEIFADSSKDGYAGYIEGKTNQEAFYKYLSKLLTKQEDSENFLEKIKNEDFLRKQRTFDNGSIPHQVHLTELKAIIRRQSEYYPFLKENQDRIEKILTFRIPYYIGPLAREKSDFAWMTRKTDDSIRPWNFEDLVDKEKSAEAFIHRMTNNDFYLPEEKVLPKHSLIYEKFTVYNELTKVRYKNEQGETYFFDSNIKQEIFDGVFKEHRKVSKKKLLDFLAKEYEEFRIVDVIGLDKENKAFNASLGTYHDLEKILDKDFLDNPDNESILEDIVQTLTLFEDREMIKKRLENYKDLFTESQLKKLYRRHYTGWGRLSAKLINGIRDKESQKTILDYLIDDGRSNRNFMQLINDDGRSNRNFMQLINDDGLSFKSIISKAQAGSHSDNLKEVVGELAGSPAIKKGILQSLKIVDELVKVMGYEPEQIVVEMARENQTTNQGRRNSRQRYKLLDDGVKNLASDLNGNILKEYPTDNQALQNERLFLYYLQNGRDMYTGEALDIDNLSQYDIDHIIPQAFIKDDSIDNRVLVSSAKNRGKSDDVPSLEIVKDCKVFWKKLLDAKLMSQRKYDNLTKAERGGLTSDDKARFIQRQLVETRQITKHVARILDERFNNELDSKGRRIRKVKIVTLKSNLVSNFRKEFGFYKIREVNNYHHAHDAYLNAVVAKAILTKYPQLEPEFVYGDYPKYNSYKTRKSATEKLFFYSNIMNFFKTKVTLADGTVVVKDDIEVNNDTGEIVWDKKKHFATVRKVLSYPQNNIVKKTEIQTGGFSKESILAHGNSDKLIPRKTKDIYLDPKKYGGFDSPIVAYSVLVVADIKKGKAQKLKTVTELLGITIMERSRFEKNPSAFLESKGYLNIRADKLIILPKYSLFELENGRRRLLASAGELQKGNELALPTQFMKFLYLASRYNESKGKPEEIEKKQEFVNQHVSYFDDILQLINDFSKRVILADANLEKINKLYQDNKENISVDELANNIINLFTFTSLGAPAAFKFFDKIVDRKRYTSTKEVLNSTLIHQSITGLYETRIDLGKLGED

SEQ ID NO: 383 - protein, 1370 aa, Streptococcus agalactiae
MNKPYSIGLDIGTNSVGYSVVTDDYKVPAKKMRVLGNTDKEYIKKNLIGALLFDGGNTASDRRLKRTARRRYTRRRNRILYLQEIFAEEMSKVDDSFFHRLEDSFLVEDDKRGSKYPIFATMQEEKDYHEKFPTIYHLRKELADKKEKANLRLVYLALAHIIKFRGHFLIEDDSFDVRNTDIQRQYQAFLEIFDTTFENNHLLSQNIDVEGILTDKISKSAKKDRILAQYPNQKSTGIFAEFLKLIVGNQADFKKHFNLEDKTPLQFAKDSYDEDLENLLGQIGDEFADLFSVAKKLYDSVLLSGILTVTDLSTKAPLSASMIQRYDEHREDLKQLKQFVKASLPEKYQEIFTDSSKDGYAGYIEGKTNQGAFYKYLSKLLTKQEGSEYFLEKIKNEDFLRKQRTFDNGSIPHQVHLTELKAIIRRQSEYYPFLKENLDRIEKILTFRIPYYVGPLAREKSDFAWMTRKTDDSIRPWNFEELVDKEASAEAFIHRMTNNDLYLPEEKVLPKHSLIYEKFTVYNELTKVRYKNEQGETYFFDSNIKQEIFDGVFKEHRKVSKKKLLDFLAKEYEEFRIVDVIGLDKENKAFNASLGTYHDLKKILDKDFLDNPDNESILEDIVQTLTLFEDREMIKKRLENYKDLFTESQLKKLYRRHYTGWGRLSAKLINGIRDKESQKTILDYLISDGRANRNFMQLIHDDGLSFKPIIDKAQAGSHSDNLKEVVGELAGSPAIKKGILQSLKIVDELVKVMGYEPEQVVVEMARENQTTNKGRRNTRQRYKLLEEGVKNLASDLNGNILKEYPTDNQALQNERLFLYYLQNGRDMYTGEALDIDNLSQYDIDHIVPQAFIKDDSIDNRVLVSSAKNRGKSDNVPSIDIVKARKAFWKKLLDAKLMSQRKYDNLTKAERGGLTSDDKARFIQRQLVETRQITKHVARILDERFNNELDSKGRRIRKVKIVTLKSNLVSNFRKEFGFYKIREVNDYHHAHDAYLNAVVAKAILTKYPQLEPEFVYGDYPKYNSYKTRKSATEKLFFYSNIMNFFKTKVTLADGTVVVKDDIEVNNDTGEIVWDKKKHFATVRKVLSYPQVNIVKKTEIQTGGFSKESILAHGNSDKLIPRKTKDIYLDPKKYGGFDSPIVAYSVLVVADIKKGKAQKLKTVTELLGITIMERFRFEKNPSAFLESKGYLNIRDDKLMILPKYSLFELENGRRRLLASAGELQKGNELALPTQYMKFLYLASRYNELKGKPEEIEQKQEFVVQHVSYFDDILQIINDFSNRVILADANLEKINKLYQDNKENISVDELANNIINLFTFTSLGAPAAFKFFDKIVDRKRYTSTKEVLNSTLIHQSITGLYETRIDLGKLGED

SEQ ID NO: 384 - protein, 1281 aa, Streptococcus iniae
MRKPYSIGLDIGTNSVGWAVITDDYKVPSKKMRIQGTTDRTSIKKNLIGALLFDNGETAEATRLKRTTRRRYTRRKYRIKELQKIFSSEMNELDIAFFPRLSESFLVSDDKEFENHPIFGNLKDEITYHNDYPTIYHLRQTLADSDQKADLRLIYLALAHIIKFRGHFLIEGNLDSENTDVHVLFLNLVNIYNNLFEEDIVETASIDAEKILTSKTSKSRRLENLIAEIPNQKRNMLFGNLVSLALGLTPNFKTNFELLEDAKLQISKDSYEEDLDNLLAQIGDQYADLFIAAKKLSDAILLSDIITVKGASTKAPLSASMVQRYEEHQQDLALLKNLVKKQIPEKYKEIFDNKEKNGYAGYIDGKTSQEEFYKYIKPILLKLDGTEKLISKLEREDFLRKQRTFDNGSIPHQIHLNELKAIIRRQEKFYPFLKENQKKIEKLFTFKIPYYVGPLANGQSSFAWLKRQSNESITPWNFEEVVDQEASARAFIERMTNFDTYLPEEKVLPKHSPLYEMFMVYNELTKVKYQTEGMKRPVFLSSEDKEEIVNLLFKKERKVTVKQLKEEYFSKMKCFHTVTILGVEDRFNASLGTYHDLLKIFKDKAFLDDEANQDILEEIVWTLTLFEDQAMIERRLVKYADVFEKSVLKKLKKRHYTGWGRLSQKLINGIKDKQTGKTILGFLKDDGVANRNFMQLINDSSLDFAKIIKNEQEKTIKNESLEETIANLAGSPAIKKGILQSIKIVDEIVKIMGQNPDNIVIEMARENQSTMQGIKNSRQRLRKLEEVHKNTGSKILKEYNVSNTQLQSDRLYLYLLQDGKDMYTGKELDYDNLSQYDIDHIIPQSFIKDNSIDNTVLTTQASNRGKSDNVPNIETVNKMKSFWYKQLKSGAISQRKFDHLTKAERGALSDFDKAGFIKRQLVETRQITKHVAQILDSRFNSNLTEDSKSNRNVKIITLKSKMVSDFRKDFGFYKLREVNDYHHAQDAYLNAVVGTALLKKYPKLEAEFVYGDYKHYDLAKLMIQPDSSLGKATTRMFFYSNLMNFFKKEIKLADDTIFTRPQIEVNTETGEIVWDKVKDMQTIRKVMSYPQVNIVMKTEVQTGGFSKESIWPKGDSDKLIARKKSWDPKKYGGFDSPIIAYSVLVVAKIAKGKTQKLKTIKELVGIKIMEQDEFEKDPIAFLEKKGYQDIQTSSIIKLPKYSLFELENGRKRLLASAKELQKGNELALPNKYVKFLYLASHYTKFTGKEEDREKKRSYVESHLYYFDVRLSQVFRVTNVEF

SEQ ID NO: 385 - protein, 1103 aa, Listeria innocua
LKLYPGEKSTGMFAQFISLIVGSKGNFQKPFDLIEKSDIECAKDSYEEDLESLLALIGDEYAELFVAAKNAYSAVVLSSIITVAETETNAKLSASMIERFDTHEEDLGELKAFIKLHLPKHYEEIFSNTEKHGYAGYIDGKTKQADFYKYMKTTLENIEGADYFIAKIEKENFLRKQRTFDNGAIPHQLHLEELEAILHQQAKYYPFLKENYDKIKSLVTFRIPYFVGPLANGQSEFAWLTRKADGEIRPWNIEEKVDFGKSAVDFIEKMTNKDTYLPKENVLPKHSLCYQKYLVYNELTKVRYINDQGKTSYFSGQEKEQIFNDLFKQKRKVKKKDLELFLRNMSHVESPTIEGLEDSFNSSYSTYHDLLKVGIKQEILDNPVNTEMLENIVKILTVFEDKRMIKEQLQQFSDVLDGVVLKKLERRHYTGWGRLSAKLLMGIRDKQSHLTILDYLMNDDGLNRNLMQLINDSNLSFKSIIEKEQVTTADKDIQSIVADLAGSPAIKKGILQSLKIVDELVSVMGYPPQTIVVEMARENQTTGKGKNNSRPRYKSLEKAIKEFGSQILKEHPTDNQELKNNRLYLYYLQNGKDMYTGQDLDIHNLSNYDIDHIVPQSFITDNSIDNLVLTSSAGNREKGNDVPPLEIVQKRKVFWEKLYQGNLMSKRKFDYLTKAERGGLTEADKARFIHRQLVETRQITKNVANILHQRFNYGKDDHGNTMKQVRIVTLKSALVSQFRKQFQLYKVRGVNDYHHAHDAYLNGVVANTLLKVYPQLEPEFVYGDYHQFDWFKANKATAKKQFYTNIMLFFAQKDRIIDENGEILWDKKYLDTVKKVMSYRQMNIVKKTEIQKGEFSKATIKPKGNSSKLIPRKTNWDPMKYGGLDSPNMAYAVVIEYAKGKNKLVFEKKIIRVTIMERKAFEKDEKAFLEEQGYRQPKVLAKLPKYTLYECEEGRRRMLASANEAQKGNQQVLPNHLVTLLHHAANCEVSDGKSLDYIESNREMFAELLAHVSEFAKRYTLAEANLNKINQLFEQNKEGDIKAIAQSFVDLMAFNAMGAPASFKFFETTIERKRYNNLKELLNSTIIYQSITGLYESRKRLDD

SEQ ID NO: 386 - protein, 1371 aa, Streptococcus dysgalactiae
MDKKYSIGLDIGTNSVGWAVITDDYKVPSKKFKVLGNTDRHSIKKNLIGALLFDSGETAEATRLKRTARRRYTRRKNRIRYLQEIFSSEMSKVDDSFFHRLEESFLVEEDKKHERHPIFGNIVDEVAYHEKYPTIYHLRKKLADSTDKADLRLIYLALAHMIKFRGHFLIEGDLNPDNSDVDKLFIQLVQTYNQLFEENPINASRVDAKAILSARLSKSRRLENLIAQLPGEKRNGLFGNLIALSLGLTPNFKSNFDLAEDAKLQLSKDTYDDDLDNLLAQIGDQYADLFLAAKNLSDAILLSDILRVNSEITKAPLSASMIKRYDEHHQDLTLLKALVRQQLPEKYKEIFFDQSKNGYAGYIDGGASQEEFYKFIKPILEKMDGTEELLAKLNREDLLRKQRTFDNGSIPHQIHLGELHAILRRQEDFYPFLKDNREKIEKILTFRIPYYVGPLARGNSRFAWMTRKSEETITPWNFEEVVDKGASAQSFIERMTNFDKNLPNEKVLPKHSLLYEYFTVYNELTKVKYVTEGMRKPAFLSGEQKKAIVDLLFKTNRKVTVKQLKEDYFKKIECFDSVEISGVEDRFNASLGTYHDLLKIIKDKDFLDNEENEDILEDIVLTLTLFEDKEMIEERLKTYAHLFDDKVMKQLKRRHYTGWGRLSRKLINGIRDKQSGKTILDFLKSDGFANRNFIQLIHDDSLTFKEAIQKAQVSGQGHSLHEQIANLAGSPAIKKGILQSVKVVDELVKVMGHKPENIVIEMARENQTTQKGQKNSRERMKRIEEGIKELGSQILKEHPVENTQLQNEKLYLYYLQNGRDMYVDQELDINRLSDYDVDHIVPQSFIKDDSIDNKVLTRSDKNRGKSDNVPSEEVVKKMKNYWRQLLNAKLITQRKFDNLTKAERGGLSELDKAGFIKRQLVETRQITKHVAQILDSRMNTKYDENDKLIREVKVITLKSKLVSDFRKDFQFYKVREINNYHHAHDAYLNAVVGTALIKKYPKLESEFVYGDYKVYDVRKMIAKSEQEIGKATAKRFFYSNIMNFFKTEITLANGEIRKRPLIETNEETGEIVWDKGRDFATVRKVLSMPQVNIVKKTEVQTGALTNESIYARGSFDKLISRKHRFESSKYGGFGSPTVTYSVLVVAKSKVQDGKVKKIKTGKELIGITLLDKLVFEKNPLKFIEDKGYGNVQIDKCIKLPKYSLFEFENGTRRMLASVMANNNSRGDLQKANEMFLPAKLVTLLYHAHKIESSKELEHEAYILDHYNDLYQLLSYIERFASLYVDVEKNISKVKELFSNIESYSISEICSSVINLLTLTASGAPADFKFLGTTIPRKRYGSPQSILSSTLIHQSITGLYETRIDLSQLGGD

SEQ ID NO: 387 - protein, 1386 aa, Streptococcus suis
MDQKYSIGLDIGTNSVGWAVVTDDYKVPAKKMKVLGNTDKQSIKKNLLGALLFDSGETAEATRLKRTARRRYTRRRNRLRYLQEIFAEEMNKVDENFFQRLDDSFLVDEDKRGERHPIFGNIAAEVKYHDDFPTIYHLRKHLADISQKADLRLVYLALAHMIKFRGHFLIEGQLKAENTNVQALFKDFVEVYDKTVEESHLSEMTVDALSILTEKVSKSRRLENLIAHYPAEKKNTLFGNLIALSLGLQPNFKTNFQLSEDAKLQFSKDTYEEDLEGLLGEIGDEYADLFASAKNLYDAILLSGILTVDDNSTKAPLSASMVKRYEEHQKDLKKLKDFIKVNAPDQYNAIFKDKNKKGYAGYIENGVKQDEFYKYLKGILLQINGSGDFLDKIDREDFLRKQRTFDNGSIPHQIHLQEMHAILRRQEEHYPFLKENQDKIEKILTFRIPYYVGPLARKGSRFAWAEYKADEKITPWNFDDILDKEKSAEKFITRMTLNDLYLPEEKVLPKHSLLYETFTVYNELTKVKYVNEQGEAKFFDANMKQEIFDHVFKENRKVTKDKLLNYLGKEFDEFRIVDLTGLDKENKVFNSSLGTYHDLRKILDKSFLDNKENEQIIEDIIQTLTLFEDREMIRQRLQKYSDIFTKAQLKKLERCHYTGWGRLSYKLINGIRNKENKKTILDYLIDDGYANRNFMQLINDDALSFKEEIAKAQVIGETDDLNQVVSDIAGSPAIKKGILQSLKIVDELVKVMGYNPANIVIEMARENQTTDKGRRNSQQRLKLLQDSLKNLDNPVNIKNVENQQLQNDRLFLYYIQNGKDMYTGETLDINNLSQYDIDHIIPQAFIKDDSFDNRVLTSSSENRGKSDNVPSIEVVRARKADWMRLRKAGLISQRKFDNLTKAERGGLTENDKAGFIKRQLVETRQITKHVAQVLDARFNAKHDENKKVIRDVKIITLKSNLVSQFRKDFKFYKVREINDYHHAHDAYLNAVIGTALLKKYPKLASEFVYGEFKKYDVRKFIAKSDKEIGKATAKYFFYSNLMNFFKKEVKFADGTVVERPDIETSEDGEIAWNKQTDFKIVRKVLSYPQVNIVKKTEVQTHGLDRGKPRGLFNANPSPKPKPDSSENLVGVKRNLDPKKYGGYAGISNSYAVLVKAIIEKGVKKKETMVLEFQGISILDRITFEKDKRAFLLGKGYKDIKKIIELPKYSLFELKDGSRRMLASILSTNNKRGEIHKGNELFVPQKFTTLLYHAKRINNPINKDHIEYVKKHRDDFKELLNYVLEFNEKYVGATKNGERLKEAVADFDSKSNEEICTSFLGAVNSKNAGLFELTSLGSASDFEFLGVKIPRYRDYTPSSLLKDSTLIHQSITGLYETRIDLSKLGED

SEQ ID NO: 388 - protein, 953 aa, Listeria ivanovii
MKKMLANIDGADYFIDQIEEENFLRKQRTFDNGTIPHQLHLEELEAILHQQAKYYPFLRKDYEKIRSLVTFRIPYFIGPLANGQSDFAWLTRKADGEIRPWNIEEKVDFGKSAIDFIEKMTNKDTYLPKENVLPKHSLCYQKYMVYNELTKIRYIDDQGKTHHFSGQEKQQIFNGLFKQQRKVKKKDLERFLYTINHIESPTIEGVEDAFNSSFATYHDLQKGGVTQEILDNPLNADMLEEIVKILTVFEDKRMIKEQLQSFSDVLDGTILKKLERRHYTGWGRLSAKLLTGIRDKHSHLTILDYLMNDDGLNRNLMQLINDSNLSFKSIIEKEQVSTADKGIQSIVAELAGSPAIKKGILQSLKIVDELVGIMGYPPQTIVVEMARENQTTGKGKNNSKPRFISLEKAIKEFGSQILKEHPTDNQCLKNDRLYLYYLQNGKDMYTGKELDIHNLSNYDIDHIIPQSFITDNSIDNRVLVSSTANREKGDNVPLLEVVRKRKAFWEKLYQAKLMSKRKFDYLTKAERGGLTEADKANFIQRQLVETRQITKNVANILYQRFNCKQDENGNEVEQVRIVTLKSTLVSQFRKQFQLYKVREVNDYHHAHDAYLNGVVANTLLKVYPQLEPEFVYGDYHQFDWFKANKATAKKQFYTNIMRFFAKENQIIDKNGEILWDNRYLDTIKKVLSYRQMNIVKKTEIQKGEFSNATVNPKGNSSKLISRKADWNPIKYGGFDGSNMAYSIVIEYEKRKKKTVIKKELIQINIMERVAFEKDQKAFLEEKGYYSPKVLTKIPKYTLYECENGRRRMLGSANEAQKGNQMVLPNHLMTLLYHAKNCEANDGESLAYIEMHREMFAELLAYISEFAKRYTLANDRLEKINMFFEQNKKGDIKVIAKSFDKLKVFNAFGAPRDFEFFETTIKRKRYYNIKELLNATIIYQSITGLYEARKRLED

SEQ ID NO: 389 - protein, 1345 aa, Streptococcus mutans
MKKPYSIGLDIGTNSVGWAVVTDDYKVPAKKMKVLGNTDKSHIKKNLLGALLFDSGNTAADRRLKRTARRRYTRRRNRILYLQEIFAEEMSKVDDSFFHRLEDSFLVTEDKRGERHPIFGNLEEEVKYYENFPTIYHLRQYLADNPEKVDLRLVYLALAHIIKFRGHFLIEGKFDTRNNDVQRLFQEFLAVYDNTFENSSLQEQNVQVEEILTDKISKSAKKDRVLKLFPNEKSNGRFAEFLKLIVGNQADFKKHFELEEKAPLQFSKDTYEEDLEELLGKIGDDYADLFTLAKNLYDAILLSGILTADDSSTKAPLSASMIQRYNEHQMDLAQLKQFIRQKLSDKYNEVFSDVSKDGYAGYIDGKTNQEAFYKYLKGLLNKIEGSGYFLDKIEREDFLRKQRTFDNGSIPHQIHLQEMRAIIRRQAEFYPFLADNQDRIEKILTFRIPYYVGPLARGKSDFAWLSRKSADKITPWNFDEIVDKESSAEAFINRMTNYDLYLPNQKVLPKHSLLYEKFTVYNELTKVKYKTEQGKTAFFDANMKQEIFDGVFKVYRKVTKDKLMDFLEKEFDEFRIVDLTGLDKENKVFNASYGTYHDLCKILDKDFLDNSKNEKILEDIVLTLTLFEDREMIRKRLENYSDLLTKEQVKKLERRHYTGWGRLSAELIHGIRNKESRKTILDYLIDDGNSNRNFMQLINDDALSFKEEIAKAQVIGETDNLNQVVSDIAGSPAIKKGILQSLKIVDELVKIMGHQPENIVVEMARENQFTNQGRRNSQQRLKGLTDSIKEFGSQILKEHPVENSQLQNDRLFLYYLQNGRDMYTGEELDIDYLSQYDIDHIIPQAFIKDNSIDNRVLTSSKENRGKSDDVPSKDVVRKMKPYWSKLLSAKLITQRKFDNLTKAERGGLTDDDKAGFIKRQLVETRQITKHVARILDERFNTETDENNKKIRQVKIVTLKSNLVSNFRKEFELYKVREINDYHHAHDAYLNAVIGKALLGVYPQLEPEFVYGDYPHFHGHEENKATAKKFFYSNIMNFFKKDDVRTDKNGEIIWKKDEHISNIKKVLSYPQVNIVKKVEEQTGGFSKESILPKGNSDKLIPRKTKKFYWDTKKYGGFDSPIVAYSILVIADIEKGKSKKLKTVKALVGVTIMEKMTFERDPVAFLERKGYRNVQEENIIKLPKYSLFKLENGRKRLLASARELQKGNEIVLPNHLGTLLYHAKNIHKVDEPKHLDYVDKHKDEFKELLDVVSNFSKKYTLAEGNLEKIKELYAQNNGEDLKELASSFINLLTFTAIGAPATFKFFDKNIDRKRYTSTTEILNATLIHQSITGLYETRIDLSKLGGD

SEQ ID NO: 390 - protein, 1345 aa, Streptococcus intermedius
MKKPYSIGLDIGTNSVGWAVVTDDYKVPAKKMKVLGNTDKSHIKKNLLGALLFDSGNTAEDRRLKRTARRRYTRRRNRILYLQEIFSEEMGKVDDSFFHRLEDSFLVTEDKRGERHPIFGNLEEEVKYHENFPTIYHLRQYLADNPEKTDLRLVYLALAHIIKFRGHFLIEGKFDTRNNDVQRLFQEFLAVYDNTFENSSLQEQNVQVEEILTDKISKSAKKDRVLKLFPNEKSNGRFAEFLKLIVGNQADFKKHFELEEKAPLQFSKDTYEEELEVLLAQIEDNYAELFLSAKKLYDSILLSGILTVTDVSTKAPLSASMIQRYNEHQMDLAQLKQFIRQKLSDKYNEVFSDVSKDGYAGYIDGKTNQEAFYKYLKGLLNKIEGSGYFLDKIEREDFLRKQRTFDNGSIPHQIHLQEMRAIIRRQAEFYPFLADNQDRIEKILTFRIPYYIGPLARGKSDFSWLSRKSADKITPWNFDEIVDKESSAEAFINRMTNYDLYLPNQKVLPRHSLLYEKFTVYNELTKVKYKTEQGKTAFFDANMKQEIFDGVFKVYRKVTKDKLMDFLEKEFDEFRIVDLTGLDKENKAFNASYGTYHDLRKILDKDFLDNSKNEKILEDIVLTLTLFEDREMIRKRLENYSDLLTKEQVKNLERRHYTGWGRLSAELIHGIRNKESRKTILDYLIDDGNSNRNFMQLINDDALSFKEEIAKAQVIGETDNLNQVVSDIAGSPAIKKGILQSLKIVDELVKIMGHQPENIVVEMARENQFTNQGRRNSQQRLKGLTDSIKEFGSQILKEHPVENSQLQNDRLFLYYLQNGRDMYTGEELDIDYLSQYDIDHIIPQAFIKDNSIDNRVLTSSKENRGKSDDVPSKDVVRKMKSYWSKLLSAKLITQRKFDNLTKAERGGLTDDDKAGFIKRQLVETRQITKHVARILDERFNTETDENNKKIRQVKIVTLKSNLVSNFRKEFELYKVREINDYHHAHDAYLNAVIGKALLGVYPQLEPEFVYGDYPHFHGHKENKATAKKFFYSNIMNFFKKDDVRTDKNGEIIWKKDEHISNIKKVLSYPQVNIVKKVEEQTGGFSKESILPKGNSDKLIPRKTKKFYWDTKKYGGFDSPIVAYSILVIANIEKGKSKKLKLVKDLVGITIMERTIFEKNPVAFLERKGYRNVQEENIVKLPKYSLFELENGRRRLLASARELQKGNEIVLPNHLGTMLYHAKNIHKVDEPKHLDYVKKHKDEFKELLDVVSNFSKKNILAESNLEKIEELYAQNNNKDITELASSFINLLTFTAIGAPAAFKFFDNNIDRKRYTSTTEILNATLIHQSITGLYETRIDLSRLGGD

SEQ ID NO: 391 - protein, 1337 aa, Listeria innocua
MKNMKKPYTIGLDIGTNSVGWAVLTDQYDLVKRKMKIAGDSEKKQIKKNFWGVRLFDEGQTAADRRMARTARRRIERRRNRISYLQGIFAEEMSKTDANFFCRLSDSFYVDNEKRNSRHPFFATIEEEVEYHKNYPTIYHLREELVNSSEKADLRLVYLALAHIIKYRGNFLIEGALDTQNTSVDGIYKQFIQTYNQVFASGIEDGSLKKLEDNKDVAKILVEKVTRKEKLERILKLYPGEKSAGMFAQFISLIVGSKGNFQKPFDLIEKSDIECAKDSYEEDLESLLALIGDEYAELFVAAKNAYSAVVLSSIITVAETETNAKLSASMIERFDTHEEDLGELKAFIKLHLPKHYEEIFSNTEKHGYAGYIDGKTKQADFYKYMKMTLENIEGADYFIAKIEKENFLRKQRTFDNGAIPHQLHLEELEAILHQQAKYYPFLKENYDKIKSLVTFRIPYFVGPLANGQSEFAWLTRKADGEIRPWNIEEKVDFGKSAVDFIEKMTNKDTYLPKENVLPKHSLCYQKYLVYNELTKVRYINDQGKTSYFSGQEKEQIFNDLFKQKRKVKKKDLELFLRNMSHVESPTIEGLEDSFNSSYSTYHDLLKVGIKQEILDNPVNTEMLENIVKILTVFEDKRMIKEQLQQFSDVLDGVVLKKLERRHYTGWGRLSAKLLMGIRDKQSHLTILDYLMNDDGLNRNLMQLINDSNLSFKSIIEKEQVTTADKDIQSIVADLAGSPAIKKGILQSLKIVDELVSVMGYPPQTIVVEMARENQTTGKGKNNSRPRYKSLEKAIKEFGSQILKEHPTDNQELRNNRLYLYYLQNGKDMYTGQDLDIHNLSNYDIDHIVPQSFITDNSIDNLVLTSSAGNREKGDDVPPLEIVRKRKVFWEKLYQGNLMSKRKFDYLTKAERGGLTEADKARFIHRQLVETRQITKNVANILHQRFNYEKDDHGNTMKQVRIVTLKSALVSQFRKQFQLYKVRDVNDYHHAHDAYLNGVVANTLLKVYPQLEPEFVYGDYHQFDWFKANKATAKKQFYTNIMLFFAQKDRIIDENGEILWDKKYLDTVKKVMSYRQMNIVKKTEIQKGEFSKATIKPKGNSSKLISRKTNWDPMKYGGLDSPNMAYAVVIEYAKGKNKLVFEKKIIRVTIMERKAFEKDEKAFLEEQGYRQPKVLAKLPKYTLYECEEGRRRMLASANEAQKGNQQVLPNHLVTLLHHVANCEVSDGKSLDYIESNREMFAELLAHVSEFAKRYTLAEANLNKINQLFEQNKEGDIKAIAQSFVDLMAFNAMGAPASFKFFETTIERKRYNNLKELLNSTIIYQSITGLYESRKRLDD

SEQ ID NO: 392 - protein, 1370 aa, Streptococcus agalactiae
MNKPYSIGLDIGTNSVGWSIITDDYKVPAKKMRVLGNTDKEYIKKNLIGALLFDGGNTAADRRLKRTARRRYTRRRNRILYLQEIFAEEMSKVDDSFFHRLEDSFLVEEDKRGSKYPIFATMQEEKDYHEKFPTIYHLRKELADKKEKADLRLVYLALAHIIKFRGHFLIEDDRFDVRNTDIQKQYQAFLEIFDTSFENNHLLSQNVDVEAILTDKISKSAKKDRILAQYPNQKSTGIFAEFLKLIVGNQADFKKHFNLEDKTPLQFAKDSYDEDLENLLGQIGDEFADLFSAAKKLYDSVLLSGILTVTDLSTKAPLSASMIQRYDEHREDLKQLKQFVKASLPEKYQEIFADSSKDGYAGYIEGKTNQEAFYKYLSKLLTKQEDSEYFLEKIKNEDFLRKQRTFDNGSIPHQVHLTELKAIIRRQSEYYPFLKENQDKIEKILTFRIPYYVGPLARGNSDFAWMTRKTDDSIRPWNFEDLVDKEKSAEAFIHRMTNNDLYLPEEKVLPKHSLIYEKFTVYNELTKVRYKNEQGETYFFDSNVKQEIFDGVFKEHRKVSKKQLLDFLAKEFEEFRIVDVTGLDKENKAFNASLGTYHDLKKILDKDFLDNPDNESILEDIVQTITLFEDREMIKKRLENYKDLFTESQLKKLYRRHYTGWGRLSAKLINGIRDRESQKIILDYLISDGRANRNFMQLINDDGLSFKSIISKAQSGSHSDNLKEVVGELAGSPAIKKGILQSLKIVDELVKVMGYEPEQIVVEMARENQTTNQGRRNSRQRYKLLEDGVKNLASDLNGDILKEYPTDNQALQNERLFLYYLQNGRDMYTGEALDIDSLSQYDIDHIVPQAFIKDDSIDNRVLVSSAKNRGKSDDVPSIDIVKARKAFWKKLLDAKLISQRKYDNLTKAERGGLTPDDKAGFIQRQLVETRQITKHVARILDERFNNKVDDNNKPIRKVKIVTLKSNLVSNFRKEFGFYKIREVNNYHHAHDAYLNAVVAKAILTKYPQLEPEFVYGDYPKYNSYKTRKSATEKLFFYSNIMNFFKTKVTLADETVVVKDDIEVNNETGEIAWDKKKHFATVRKVLSYPQVNIVKKTEVQTGGFSKESILAHSNSDKLIPRKTKDIYLDPKKYGGFDSPIVAYSVLVLADIKKGKAQKLKTVKELIGITIMERERFEKNPSAFLESKGYLNIRTDKLIILPKYSLFELENGRRRLLASAGELQKGNELALPTQYMKFLYLASRYNESKGKPEEIEKKQEFVNQHVSYFDDILQLINDFSKRVILADANLEKINKLYSDNKDNTPVDELAKNIINLFTFTSLGAPAAFKFFDKSVDRKRYTSTKEVLDSTLIHQSITGLYETRIDLGKLGED

SEQ ID NO: 393 - protein, 1273 aa, Streptococcus iniae
  misc_feature (1267)..(1267): Xaa can be any naturally occurring amino acid
MRKPYSIGLDIGTNSVGWAVITDDYKVPSKKMRIQGTTDRTSIKKNLIGALLFDNGETAEATRLKRTTRRRYTRRKYRIKELQKIFSSEMNELDIAFFPRLSESFLVSDDKEFENHPIFGNLKDEITYHNDYPTIYHLRQTLADSDQKADLRLIYLALAHIIKFRGHFLIEGNLDSENTDVHVLFLNLVNIYNNLFEEDIVETASIDAEKILTSKTSKSRRLENLIAEIPNQKRNMLFGNLVSLALGLTPNFKTNFELLEDAKLQISKDSYEEDLDNLLAQIGDQYADLFIAAKKLSDAILLSDIITVKGASTKAPLSASMVQRYEEHQQDLALLKNLVKKQIPEKYKEIFDNKEKNGYAGYIDGKTSQEEFYKYIKPILLKLDGTEKLISKLEREDFLRKQRTFDNGSIPHQIHLNELKAIIRRQEKFYPFLKENQKKIEKLFTFKIPYYVGPLANGQSSFAWLKRQSNESITPWNFEEVVDQEASARAFIERMTNFDTYLPEEKVLPKHSPLYEMFMVYNELTKVKYQTEGMKRPVFLSSEDKEEIVNLLFKKERKVTVKQLKEEYFSKMKCFHTVTILGVEDRFNASLGTYHDLLKIFKDKAFLDDEANQDILEEIVWTLTLFEDQAMIERRLVKYADVFEKSVLKKLKKRHYTGWGRLSQKLINGIKDKQTGKTILGFLKDDGVANRNFMQLINDSSLDFAKIIKNEQEKTIKNESLEETIANLAGSPAIKKGILQSIKIVDEIVKIMGQNPDNIVIEMARENQSTMQGIKNSRQRLRKLEEVHKNTGSKILKEYNVSNTQLQSDRLYLYLLQDGKDMYTGKELDYDNLSQYDIDHIIPQSFIKDNSIDNTVLTTQASNRGKSDNVPNIETVNKMKSFWYKQLKSGAISQRKFDHLTKAERGALSDFDKAGFIKRQLVETRQITKHVAQILDSRFNSNLTEDSKSNRNVKIITLKSKMVSDFRKDFGFYKLREVNDYHHAQDAYLNAVVGTALLKKYPKLEAEFVYGDYKHYDLAKLMIQPDSSLGKATTRMFFYSNLMNFFKKEIKLADDTIFTRPQIEVNTETGEIVWDKVKDMQTIRKVMSYPQVNIVMKTEVQTGGFSKESIWPKGDSDKLIARKKSWDPKKYGGFDSPIIAYSVLVVAKIAKGKTQKLKTIKELVGIKIMEQDEFEKDPIAFLEKKGYQDIQTSSIIKLPKYSLFELENGRKRLLASAKELQKGNELALPNKYVKFLYLASHYTKFTGKEEDREKKRSYVESHLYYFXEVKSSF

SEQ ID NO: 394 - protein, 1267 aa, Streptococcus iniae
  misc_feature (1265)..(1265): Xaa can be any naturally occurring amino acid
  misc_feature (1267)..(1267): Xaa can be any naturally occurring amino acid
MRKPYSIGLDIGTNSVGWAVITDDYKVPSKKMRIQGTTDRTSIKKNLIGALLFDNGETAEATRLKRTTRRRYTRRKYRIKELQKIFSSEMNELDIAFFPRLSESFLVSDDKEFENHPIFGNLKDEITYHNDYPTIYHLRQTLADSDQKADLRLIYLALAHIIKFRGHFLIEGNLDSENTDVHVLFLNLVNIYNNLFEEDIVETASIDAEKILTSKTSKSRRLENLIAEIPNQKRNMLFGNLVSLALGLTPNFKTNFELLEDAKLQISKDSYEEDLDNLLAQIGDQYADLFIAAKKLSDAILLSDIITVKGASTKAPLSASMVQRYEEHQQDLALLKNLVKKQIPEKYKEIFDNKEKNGYAGYIDGKTSQEEFYKYIKPILLKLDGTEKLISKLEREDFLRKQRTFDNGSIPHQIHLNELKAIIRRQEKFYPFLKENQKKIEKLFTFKIPYYVGPLANGQSSFAWLKRQSNESITPWNFEEVVDQEASARAFIERMTNFDTYLPEEKVLPKHSPLYEMFMVYNELTKVKYQTEGMKRPVFLSSEDKEEIVNLLFKKERKVTVKQLKEEYFSKMKCFHTVTILGVEDRFNASLGTYHDLLKIFKDKAFLDDEANQDILEEIVWTLTLFEDQAMIERRLVKYADVFEKSVLKKLKKRHYTGWGRLSQKLINGIKDKQTGKTILGFLKDDGVANRNFMQLINDSSLDFAKIIKNEQEKTIKNESLEETIANLAGSPAIKKGILQSIKIVDEIVKIMGQNPDNIVIEMARENQSTMQGIKNSRQRLRKLEEVHKNTGSKILKEYNVSNTQLQSDRLYLYLLQDGKDMYTGKELDYDNLSQYDIDHIIPQSFIKDNSIDNTVLTTQASNRGKSDNVPNIETVNKMKSFWYKQLKSGAISQRKFDHLTKAERGALSDFDKAGFIKRQLVETRQITKHVAQILDSRFNSNLTEDSKSNRNVKIITLKSKMVSDFRKDFGFYKLREVNDYHHAQDAYLNAVVGTALLKKYPKLEAEFVYGDYKHYDLAKLMIQPDSSLGKATTRMFFYSNLMNFFKKEIKLADDTIFTRPQIEVNTETGEIVWDKVKDMQTIRKVMSYPQVNIVMKTEVQTGGFSKESIWPKGDSDKLIARKKSWDPKKYGGFDSPIIAYSVLVVAKIAKGKTQKLKTIKELVGIKIMEQDEFEKDPIAFLEKKGYQDIQTSSIIKLPKYSLFELENGRKRLLASAKELQKGNELALPNKYVKFLYLASHYTKFTGKEEDREKKRSYVESHLYXFX

SEQ ID NO: 395 - protein, 306 aa, Streptococcus pyogenes
IETNGETGEIVWDKGRDFATVRKVLSMPQVNIVKKTEVQTGGFSKESILPKRNSDKLIARKKDWDPKKYGGFDSPTVAYSVLVVAKVEKGKSKKLKSVKELLGITIMERSSFEKDPIDFLEAKGYKEVRKDLIIKLPKYSLFELENGRKRMLASAGELQKGNELALPSKYVNFLYLASHYEKLKGSPEDNEQKQLFVEQHKHYLDEIIEQISEFSKRVILADANLDKVLSAYNKHRDKPIREQAENIIHLFTLTNLGAPAAFKYFDTTIDRKRYTSTKEVLDATLIHQSITGLYETRIDLSQLGGD

SEQ ID NO: 396 - protein, 1079 aa, Enterococcus durans
MDEEAKIQLSKESYEEELESLLEKSGEEFRDVFLQAKKVYDAILLSDILSTKKQNSKAKLSLGMIERYDSHKKDLEELKQFVKANLPEKTAIFFKDSSKNGYAGYIDGKTTQEDFYKFLKKELNGIAGSERFMEKVDQENFLLKQRTTANGVIPHQVHLTELKAIIERQKPYYPSLEEARDKMIRLLTFRIPYYVGPLAQGEETSSFAWLERKTPEKVTPWNATEVIDYSASAMKFIQRMINYDTYLPTEKVLPKHSILYQKYTIFNELTKVAYKDERGIKHQFSSKEKREIFKELFQKQRKVTVKKLQQFLSANYNIEDAEILGVDKAFNSSYATYHDFLDLAKPNTERVAELLEQPEMNAMFEDIVKILTIFEDREMIRTQLKKYQSVLGDGFFKKLVKKHYTGWGRLSERLINGIRDKKTNKTILDYLIDDDDFPYNRNRNFMQLINDDSLSFKEELANELALAGNQSLLEVVEALLGSPAIKKGIWQTLKIVEELIEIIGYNPKNIVVEMARENQRTNRSKPRLKALEEALKSFDSPLLKEQPVDNQALQKDRLYLYYLQNGKDMYTGEALDIDRLSEYDIDHIIPRSFIVDNSIDNKVLVSSKENRLKMDDVPDQKVVIRMRRYWEKLLRANLISERKFAYLTKLELTPEDKARFIQRQLVETRQITKHVAAILDQYFNQPEESKNKGIRIITLKSSLVSQFRKTFGINKVREINNHHHAHDAYLNGVVAIALLKKYPKLEPEFVYGNYTKFNLATENKATAKKEFYSNILRFFEKEEYSYDENGEIFWDKARHIPQIKKVISSHQVNIVKKVEVQTGGFYKETVNPKGKPDKLIQRKAGWDVSKYGGFGSPVVAYAVAFIYEKGKARKKAKAIEGITIMKQSLFEQDPIGFLSNKGYSNVTKFIKLSKYTLYELENGRRRMVASHKEAQKANSFILPEKLVTLLYHAQHYDEIAHKESFDYVNDHLSEFREILDQVIDFSNRYTIAAKNTEKIAELFEQNQESTVQSLSQSFINLMQLNAMGAPADFKFFDVIIPRKRYPSLTEIWESTIIYQSITGLRETRTRMATLWDGEQ

SEQ ID NO: 397 - protein, 1338 aa, Streptococcus mutans
MDLIGTNSVGWAVVTDDYKVPAKKMKVLGNTDKSHIKKNLLGALLFDSGNTAADRRLKRTARRRYTRRRNRILYLQEIFAEEMSKVDDSFFHRLEDSFLVTEDKRGERHPIFGNLEEEVKYHENFPTIYHLRQYLADNPEKVDLRLVYLALAHIIKFRGHFLIEGKFDTRNNDVQRLFQEFLAVYDNTFENSSLQEQNVQVEEILTDKISKSAKKDRVLKLFPNEKSNGRFAEFLKLIVGNQADFKKHFELEEKAPLQFSKDTYEEELEVLLAQIGDNYAELFLSAKKLYDSILLSGILTVTDVSTKAPLSASMIQRYNEHQMDLAQLKQFIRQKLSDKYNEVFSDVSKDGYAGYIDGKTNQEAFYKYLKGLLNKIEGSGYFLDKIEREDFLRKQRTFDNGSIPHQIHLQEMRAIIRRQAEFYPFLADNQDRIEKILTFRIPYYVGPLARGKSDFAWLSRKSADKITPWNFDEIVDKESSAEAFINRMTNYDLYLPNQKVLPKHSLLYEKFTVYNELTKVKYKTEQGKTAFFDANMKQEIFDGVFKVYRKVTKDKLMDFLEKEFDEFRIVDLTGLDKENKAFNASYGTYHDLRKILDKDFLDNSKNEKILEDIVLTLTLFEDREMIRKRLENYSDLLTKEQVKKLERRHYTGWGRLSAELIHGIRNKESRKTILDYLIDDGNSNRNFMQLINDDALSFKEEIAKAQVIGETDNLNQVVSDIAGSPAIKKGILQSLKIVDELVKIMGHQPENIVVEMARENQFTNQGRRNSQQRLKGLTDSIKEFGSQILKEHPVEHSQLQNDRLFLYYLQNGRDMYTGEELDIDYLSQYDIDHIIPQAFIKDNSIDNRVLTSSKENRGKSDDVPSKNVVRKMKSYWSKLLSAKLITQRKFDNLTKAERGGLTDDDKAGFIKRQLVETRQITKHVARILDERFHTETDENNKKIRQVKIVTLKSNLVSNFRKEFELYKVREINDYHHAHDAYLNAVIGKALLGVYPQLEPEFVYGDYPHFHGHKENKATAKKFFYSNIMNFFKKDDVRTDKNGEIIWKKDEHISNIKKVLSYPQVNIVKKVEEQTGGFSKESILPKGNSDKLIPRKTKKFYWDTKKYGGFDSPIVAYSILVIADIEKGKSKKLKTVKALVGVTIMEKMTFERDPVAFLERKGYRNVQEENIIKLPKYSLFKLENGRKRLLASARELQKGNEIVLPNHLGTLLYHAKNIHKVDEPKHLDYVDKHKDEFKELLDVVSNFSKKYTLAEGNLEKIKELYAQNNGEDLKELASSFINLLTFTAIGAPATFKFFDKNIDRKRYTSTTEILNATLIHQSITGLYETRIDLSKLGGD

SEQ ID NO: 398 - protein, 200 aa, Streptococcus iniae
MEQDEFEKDPIAFLEKKGYQDIQTSSIIKLPKYSLFELENGRKRLLASAKELQKGNELALPNKYVKFLYLASHYTKFTGKEEDREKKRSYVESHLYYFDEIMQIIVEYSNRYILADSNLIKIQNLYKEKDNFSIEEQAINMLNLFTFTDLGAPSAFKFFNGDIDRKRYSSTNEIINSTLIYQSPTGLYETRIDLSKLGGK

SEQ ID NO: 399 - protein, 1345 aa, Streptococcus anginosus
MKKEYSIGLDIGTNSVGWAVITDDYKVPAKKMKVLGNTDKQSIKKNLLGALLFDSGETAEATRLKRTARRRYTRRKNRLRYLQEIFTEEMNKVDENFFQRLDDSFLVEEDKQGSKYPIFGTLKEEKEYHKKFKTIYHLREELANSKEKADLRLVYLALAHMIKFRGHFLYEGDLKAENTDVQALFKDFVEEYDKTIEESHLSEITVDALSILTEKVSKSSRLENLIAHYPTEKKNTLFGNLIALSLGLQPNFKTNFQLSEDAKLQFSKDTYEEDLEELLGEIGDEYADLFASAKNLYDAILLSGILAVDDNTTKAPLSASMVKRYEEHQKDLKKLKDFIKVNAPDQYNAIFKDKNKKGYAGYIESGVEQDEFYKYLKGILLKINGSGDFLDKIDCEDFLRKQRTFDNGSIPHQIHLQEMHAILRRQGEHYPFLKENQDKIEKILTFRIPYYVGPLARKGSRFAWAEYKADEKITPWNFDDILDKEKSAEKFITRMTLNDLYLPEEKVLPKHSPLYETFTVYNELTKVKYVNEQGEAKFFDTNMKQEIFDHVFKENRKVTKDKLLNYLNKEFEEFRIVNLTGLDKENKAFNSSLGTYHDLRKILDKSFLDDKANEKTIEDIIQTLTLFEDREMIRQRLQKYSDIFTKAQLKKLERRHYTGWGRLSYKLINGIRNKENKKTILDYLIDDGYANRNFMQLINDDALSFKEEIARAQIIGDVDDIANVVHDLPGSPAIKKGILQSVKIVDELVKVMGHNPANIIIEMARENQTTDKGRRNSQQRLKLLQDSLKNLDNPVNIKNVENQQLQNDRLFLYYIQNGKDMYTGETLDINNLSQYDIDHIIPQAFIKDNSLDNRVLTRSDKNRGKSDDVPSIEVVHEMKSFWSKLLSVKLITQRKFDNLTKAERGGLTEEDKAGFIKRQLVETRQITKHVAQILDERFNTEFDGAQRRIRNVKIITLKSNLVSNFRKEFELYKVREINDYHHAHDAYLNAVVGNALLLKYPQLEPEFVYGEYPKYNSYRSRKSATEKFLFYSNILRFFKKEDIQTNEDGEIAWNKEKHIKILRKVLSYPQVNIVKKTEEQTGGFSKESILPKGESDKLIPRKTKNSYWNPKKYGGFDSPVVAYSILVFADVEKGKSKKLRKVQDMVGITIMEKKRFEKNPVDFLEQRGYRNVRLEKIIKLPKYSLFELENKRRRLLASARELQKGNELVIPQRFTTLLYHSYQIEKNYEPEHREYVEKHKDEFKELLEYISVFSRKYVLADNNLTKIEMLFSKNKDAEVSSLAKSFISLLTFTAFGAPAAFNFFGENIDRKRYTSVTECLNATLIHQSITGLYETRIDLSKLGED

SEQ ID NO: 400 - protein, 1356 aa, Lactobacillus farciminis
MTKKEQPYNIGLDIGTGSVGWAVTNDNYDLLNIKKKNLWGVRLFEGAQTAKETRLNRSTRRRYRRRKNRINWLNEIFSEELANTDPSFLIRLQNSWVSKKDPDRKRDKYNLFIDNPYTDKEYYREFPTIFHLRKELIINKNKADIRLVYLALHNILKYRGNFTYEHQKFNISTLNSNLSKELIELNQQLIKYDISFPDNCDWNHISDILIGRGNATQKSSNILNNFTLDKETKKLLKEVINLILGNVAHLNTIFKTSLTKDEEKLSFSGKDIESKLDDLDSILDDDQFTVLDTANRIYSTITLNEILNGESYFSMAKVNQYENHAIDLCKLRDMWHTTKNEKAVGLSRQAYDDYINKPKYGTKELYTSLKKFLKVALPTNLAKEAEEKISKGTYLVKPRNSENGVVPYQLNKIEMEKIIDNQSQYYPFLKENKEKLLSILSFRIPYYVGPLQSSEKNPFAWMERKSNGHARPWNFDEIVDREKSSNKFIRRMTVTDSYLVGEPVLPKNSLIYQRYEVLNELNNIRITENLKTNPTGSRLTVETKQHIYNELFKNYKKITVKKLTKWLIAQGYYKNPILIGLSQKDEFNSTLTTYLDMKKIFGSSFMENNKNYNQIEELIEWLTIFEDKQILNEKLHSSNYSYTSDQIKKISNMRYKGWGRLSKKILTCITTETNTPKSLQLSNYSVLDLMWTTNNNFISIISNDKYDFKNYIENHNLNKNEDQNISNLVNDIHVSPALKRGITQSIKIVQEIVKFMGHAPKYIFIEVTRETKKSEITTSRGKRIQRLQSKLLNKANGFKPQLRKYLVPNEKIQEELKKHKNDLSSERIMLYFLQNGKSLYSEESLNINKLSDYQVDHILPRTYIPDDSLENKALVLAKENQRKADDLLLNSNVIDKNLERWTYMLNNNMMGLKKFKNLTRRVITDKDKLGFIHRQLVQTSQMVKGVANILNSMYKNQGTTCIQARANLSTAFRKALSDQDDRYHFKHPELVKNRNINDFHHAQDAYLASFLGTYRLRRFPTDEMLLMNGEYNKFYGQVKELYSKKKKLPDSRKNGFIISPLVNGTTQYDRNTGEIIWNVGFRDKILKIFNYHQCNVTRKTEIKTGQFYDQTIYSPKNPKYKKLIAQKKDMDPNIYGGFSGDNKSSITIVKIDNNKIKPVAIPIRLINDLKDKKTLQNWLEENVKHKKSIQIIKNNVPIGQIIYSKKVGLLSLNSDREIANRQQLILPPEHSALLRILQIPDEDPDQILAFYDKNILVEILQELITKMKKFYPFYKNEQEFLASNIENFNQATTSEKINSLEELITLLHANSTSAHLIFNNIEKKAFGRKTHGLTLNDTDFIYQSVTGLYETRIHIE

SEQ ID NO: 401 - protein, 543 aa, Streptococcus pyogenes
QELDINRLSGYDVDHIVPQSFLKDDSIDNKVLTRSDKNRGKSDNVPSEEVVKKMKNYWRQLLNAKLITQRKFDNLTKAERGGLSELDKVGFIKRQLVETRQITKHVAQILDSRMNTKYDENDKLIREVRVITLKSKLVSDFRKDFQFYKVREINNYHHAHDAYLNAVVGTALIKKYPKLESEFVYGDYKVYDVRKMIAKSEQEIGKATAKYFFYSNIMNFFKTEITLANGEIRKRPLIETNGETGEIVWDKGRDFATVRKVLSMPQVNIVKKTEVQTGGFSKESILPKRNSDKLIARKKDWDPKKYGGFDSPTVAYSVLVVAKVEKGKSKKLKSVKELLGITIMERSSFEKDPIDFLEAKGYKEVRKDLIIKLPKYSLFELENGRKRMLASAGELQKGNELALPSKYVNFLYLASHYEKLKGSPEDNEQKQLFVEQHKHYLDEIIEQISEFSKRVILADANLDKVLSAYNKHRDKPIREQAENIIHLFTLTNLGAPAAFKYFDTTIDRKRYTSTKEVLDATLIHQSITGLYETRIDLSQLGGD

SEQ ID NO: 402 - protein, 1333 aa, Roseburia hominis
MSQNIVDYCIGLDLGTGSVGWAVVDMNHRLMKRNGKHLWGSRLFSNAETAATRRSSRSIRRRYNKRRERIRLLRAILQDMVLEKDPTFFIRLEHTSFLDEEDKAKYLGTDYKDNYNLFIDEDFNDYTYYHKYPTIYHLRKALCESTEKADPRLIYLALHHIVKYRGNFLYEGQKFNMDASNIEDKLSDVFTQFADFNNIPYEDDEKKNLEILEILKKPLSKKAKVDEVMALISPEKEFKSAYKELVTGIAGNKMNVTKMILCESIKQGDSEIKLKFSDSNYDDQFSEVENDLGEYVEFIDSLHNIYSWVELQTIMGATHTDNASISEAMVSRYNKHHEDLQLLKKCIKDNVPKKYFDMFRNDSEKVKGYYNYINRPNKAPVDEFYKFVKKCIEKVDTPEAKQILHDIELENFLLKQNSRTNGSVPYQMQLDEMIKIIDNQAKYYPVLKEKREQLLSILTFRIPYYFGPLNETSEHAWIKRLEGKENQRILPWNYQDTVDVDATAEGFIKRMRSYCTYFPDEEVLPKNSLIVSKYEVYNELNKIRVDDKLLEVDVKNDIYNELFMKNKTVTEKKLKNWLVNNQCCRKDAEIKGFQKENQFSTSLTPWIDFTNIFGKIDQSNFDLIEKIIYDLTVFEDKKIMKRRLKKKYALPDDKIKQILKLKYKDWSRLSKKLLDGIVADNRFGSSVTVLDVLEMSRLNLMEIINDKELGYAQMIEEASSCPKDGKFTYEEVAKLAGSPALKRGIWQSLQIVEEITKVMKCRPKYIYIEFERSEEAKERTESKIKKLENVYKDLDEQTKKEYKSVLEELKGFDNTKKISSDSLFLYFTQLGKCMYSGKKLDIDSLDKYQIDHIVPQSLVKDDSFDNRVLVLPSENQRKLDDLVVPFDIRDKMYRFWKLLFDHELISPKKFYSLIKTEYTERDEERFINRQLVETRQITKNVTQIIEDHYSTTKVAAIRANLSHEFRVKNHIYKNRDINDYHHAHDAYIVALIGGFMRDRYPNMHDSKAVYSEYMKMFRKNKNDQKKWKDGFVINSMNYPYEVDGKLIWNPDLINEIKKCFYYKDCYCTTKLDQKSGQMFNLTVLPNDAHSAKGTTEAVIPVNKNRKDVNKYGGFSGLQYVIAAIEGTKKKGKKLVKVRKLSGIPLYLKQADIKEQIEYVEKEEKLSDVKIIKNNIPLNQLIEIDGRQYLLTSPTECVNAMQLVLNEEQCKLIADIYNAIYKQDFDGLDNMLMIQLYLQLIDKLKTLYPIYMGIVEKFEKLTEDFVSISKEEKANVIKQMLIIMHKGPQNGNIIYDDFNVGKRIGRLNGRTFYLDNIEFISQSPTGIYTKKYKL

SEQ ID NO: 403 - protein, 1082 aa, Geobacillus thermodenitrificans; identical to SEQ ID NO: 11

SEQ ID NO: 404 - protein, 1052 aa, S. Aureus; identical to SEQ ID NO: 10

SEQ ID NO: 405 - protein, 36 aa, Artificial Sequence
  Synthetic
  misc_feature (2)..(2): Xaa can be any naturally occurring amino acid
  misc_feature (4)..(25): Xaa can be any naturally occurring amino acid
  misc_feature (26)..(29): may be absent
  misc_feature (32)..(32): Xaa can be any naturally occurring amino acid
  misc_feature (33)..(35): may be absent
HXEXXXXXXXXXXXXXXXXXXXXXXXXXXPCXXXXC

SEQ ID NO: 406 - protein, 15 aa, Artificial Sequence
  Synthetic
EDTLEGDIQHGLAQP

SEQ ID NO: 407 - DNA, 24 bp, Artificial Sequence
  Synthetic
ttctccacaggagtcaggtgcacc

SEQ ID NO: 408 - DNA, 24 bp, Artificial Sequence
  Synthetic
tccacaggagtcaggtgcaccatg

SEQ ID NO: 409 - DNA, 23 bp, Artificial Sequence
  Synthetic
ggcactgcggctggaggtggggg

SEQ ID NO: 410 - DNA, 48 bp, Artificial Sequence
  Synthetic
caaacagacaccatggtgcacctgactcctgaggagaagtctgccgtt

SEQ ID NO: 411 - DNA, 20 bp, Artificial Sequence
  Synthetic
gtgcatctgactcctgagga

SEQ ID NO: 412 - DNA, 20 bp, Artificial Sequence
  Synthetic
catctgactcctgaggagaa
